(19) United States
(12) Patent Application Publication
(10) Pub. No.: US 2025/0008961 A1
(43) Pub. Date: Jan. 9, 2025

(54) PAENIBACILLUS STRAINS PRODUCING LOW AMOUNTS OF DAB COMPRISING COMPOUNDS

(71) Applicant: BASF SE, Ludwigshafen (DE)

(72) Inventors: Tobias May, Ludwigshafen (DE); Judith Zimmermann, Limburgerhof (DE); Bogdan Tokovenko, Ludwigshafen (DE); Daniel Christoph Heinrich, Ludwigshafen (DE); Reinhard Stierl, Limburgerhof (DE); Andrea Herold, Ludwigshafen (DE)

(21) Appl. No.: 18/711,970

(22) PCT Filed: Nov. 11, 2022
(86) PCT No.: PCT/EP2022/081565

§ 371 Date: May 21, 2024

(30) Foreign Application Priority Data
Nov. 22, 2021 (EP) 21209627.5

(51) Int. Cl. A01N 63/25; A01P 3/00; C12N 1/20; C12N 9/10

(52) U.S. Cl. CPC A01N 63/25; A01P 3/00; C12N 1/20; C12N 9/1096; C12Y 206/01076

(57) ABSTRACT

The present invention relates to Paenibacillus species strains producing low amounts of com-pounds requiring L-2,4-diaminobutanoate as precursor and exopolysaccharides comprising low amounts of compounds requiring L-2,4-diaminobutanoate as precursor, as well as mixtures, compositions and methods comprising these Paenibacillus species strains and/or exopolysac-charides.

### FIELD

[0001] The present invention relates to Paenibacillus species strains producing low amounts of compounds requiring L-2,4-diaminobutanoate as precursor and exopolysaccharides comprising low amounts of compounds requiring L-2,4-diaminobutanoate as precursor, as well as mixtures, compositions and methods comprising these Paenibacillus species strains and/or exopolysaccharides.

### BACKGROUND

[0002] The Gram-positive bacteria of the genus Paenibacillus are known for a multitude of potential uses. Paenibacillus species strains have been described as production hosts for recombinant proteins, basic chemicals or useful polymers, like exopolysaccharides (Heinze et al, 2020, Draft Genome Sequence of Paenibacillus polymyxa DSM 292, a Gram-positive, Spore-Forming Soil Bacterium with High Biotechnological Potential. Microbiology resource announcements, 9(11), e00071), (Schilling et al, 2020, Engineering of the 2,3-butanediol pathway of Paenibacillus polymyxa DSM 365, Metabolic Engineering, Volume 61, Pages 381-388 and Ruetering et al, 2017, Tailor-made exopolysaccharides-CRISPR-Cas9 mediated genome editing in Paenibacillus polymyxa, Synthetic Biology, 2(1): ysx007).

[0003] In particular Paenibacillus strains isolated from plants and their rhizosphere have further shown to have additional uses in agriculture. These comprise the use as biological pesticide to protect plants from plant pathogenic fungi and bacteria, promotion of plant growth via the production of phytohormones and mobilization of nutrients, biological nitrogen fixation and induction of systemic acquired resistance. Many of these uses are summarized in Jeong et al, 2019, Chronicle of a Soil Bacterium: Paenibacillus polymyxa E681 as a Tiny Guardian of Plant and Human Health, Frontiers in Microbiology, Volume 10, Article 467, using Paenibacillus polymyxa E681 as an example.

[0004] It is clear that many of these applications will not need the full spectrum of abilities that Paenibacillus strains can provide. For example, the ability to produce antifungal or antibacterial substances can be seen as production of unnecessary or even unwanted side products when Paenibacillus strains are used for the production of recombinant enzymes, exopolysaccharides or basic chemicals. For these applications it can also be considered as an advantage, if the Paenibacillus species strain used comprises a small genome to lessen the metabolic burden created by the production of unnecessary proteins or the production of compounds which are unnecessary for the production of the protein or compound of interest and would be considered as unwanted side products which in some cases may even cause additional measures and cost in down-stream-processing to either purify the compound of interest or to dispose the side products in a save way. A lower production of unnecessary proteins and unwanted side products may also free up metabolic resources to enhance the production capacity for the respective protein or compound of interest. Microbial production strains of other species have been modified to produce less unwanted side products, see for example WO9822598, WO9960137 and US2017121719. Most of these efforts have been concentrated on other microorganisms than Paenibacillus. Thus, there remains a need for improved Paenibacillus strains which produce lower amounts of unnecessary proteins and/or side products.

[0005] Applications of Paenibacillus strains in agriculture also suffer sometimes from specific features of Paenibacillus strains. For example, there is an interest to use mixtures of microorganisms in agriculture, either to support plant growth, by providing a diverse and stable rhizosphere microbial community of microbial strains with plant growth enhancing features as for example in WO201845004, or to enhance particular functions, like protection against fungal pathogens by combining microbial strains having complementing features. Mixtures of two or several Bacillus species or mixtures of Bacillus species with Pseudomonas species and mixtures of several Pseudomonas species have been described for example in WO2016109424, CN109699682 and WO2017178529. A further motivation is to provide protection against fungal pathogens and an enhanced supply of nitrogen to the plants. Mixtures between a Bacillus strain with antifungal effect and Bradyrhizobium strains for enhanced nitrogen supply is described in WO2020263812.

[0006] Paenibacillus strains have been described to produce several antibacterial substances, which suppress the growth on gram-negative and/or gram-positive bacteria, like polymyxins, tridecaptins, polypeptin, paenilipoheptins, octapeptins, olipeptin, gavaserine, saltavalin, several lantibiotics, like paenicidin, paenibacillin, paenilan, and gatavalin. Most Paenibacillus strains have the capability to produce several, but not all of them. This means that most Paenibacillus strains can negatively impact the growth of other useful gram-negative or gram-positive bacteria which may either form natural protective bacterial communities on the plant surface, like the ones described in Helfrich et al., 2018, Bipartite interactions, antibiotic production and biosynthetic potential of the Arabidopsis leaf microbiome, Nature Microbiology, VOL 3, pages 909-919, or may intentionally been added to the Paenibacillus strains to enhance positive effects on plant growth and plant health. Examples for such mixtures are mixtures in which the antifungal and nitrogen fixating ability of Paenibacillus strains, as described in Ali et al, 2021, Functional Analysis and Genome Mining Reveal High Potential of Biocontrol and Plant Growth Promotion in Nodule-Inhabiting Bacteria Within Paenibacillus polymyxa Complex Front. Microbiol., 18, Article 618601, is combined with the antifungal and nitrogen fixing ability of Rhizobia, as described in Das et al, 2017, Rhizobia: a potential biocontrol agent for soilborne fungal pathogens, Folia Microbiol, 62, pages 425-435, are combined.

[0007] Accordingly, there is a need to develop improved Paenibacillus strains which produce less compounds which interfere with the growth of attractive mixing partners selected from Gram-negative or Gram-positive bacteria. This causes also a need to develop methods to create and identify such strains without laborious recombinant methods or intensive chemical mutagenesis. The methods and strains provided herein address these needs.

### SUMMARY OF THE INVENTION

[0008] The invention comprises Paenibacillus species strains comprising only one genetic locus comprising at least 80% sequence identity to a polynucleotide sequence of any one of SEQ ID NOs: 222, 223, 224, 225, 413, 414, 415, 416, 417, 418 and not comprising an open reading frame for a diaminobutyrate-2-oxoglutarate-transaminase comprising an amino acid sequence of at least 80% sequence identity to SEQ ID NO: 217. Preferably the Paenibacillus species strains do not comprise a polynucleotide sequence encoding an amino acid sequence comprising at least 80% sequence identity to SEQ ID NO: 1.

[0009] In one embodiment the Paenibacillus species strains have an ANI-Value of at least 99.9% to the Paenibacillus polymyxa strain LU17007 deposited as DSM 26970 or to the Paenibacillus polymyxa strain SB3-1. In a further embodiment the Paenibacillus species strains are derived from a parent strain comprising an open reading frame encoding an amino acid sequence of at least 80% sequence identity to SEQ ID NO: 217 and an open reading frame encoding an amino acid sequence of at least 80% sequence identity to SEQ ID NO: 409, preferably encoded by a polynucleotide sequence of at least 80% sequence identity to SEQ ID NO: 411, and an open reading frame encoding an amino acid sequence of at least 80% sequence identity to SEQ ID NO: 410 preferably encoded by a polynucleotide sequence of at least 80% sequence identity to SEQ ID NO: 412.

[0010] The invention comprises also mixtures comprising a) a pure culture of a Paenibacillus species strain which does not produce polymyxin and b) a pure culture of a microorganism which is sensitive to polymyxin. Preferably the Paenibacillus species strain of a) does not produce a polymyxin or a tridecaptin, or does not produce a polymyxin and does not produce a tridecaptin, and the second microorganism of b) is sensitive to a polymyxin or a tridecaptin or is sensitive to a polymyxin and a tridecaptin. Preferably the microorganism of b) is not sensitive to the presence of the Paenibacillus species strain of a) but is sensitive to the presence of the parent strain of the Paenibacillus species strain of a). In one embodiment the mixture comprises a) a pure culture of a Paenibacillus species strain which does not comprise an open reading frame for a diaminobutyrate-2-oxoglutarate-transaminase comprising an amino acid sequence of at least 90% sequence identity to at least one of SEQ ID NO: 217, 218, 219, 220 or 221 and b) a pure culture of a microorganism which is sensitive to at least one of polymyxin, tridecaptin, polypeptin, paenilipoheptin, octapeptin, jolipeptin, gavaserin or saltavalin, preferably is sensitive to at least one of polymyxin, tridecaptin or both.

[0011] Preferably the Paenibacillus species strain of a) comprises no or only one locus encoding an amino acid sequence comprising at least 90% sequence identity to SEQ ID NO: 1 and does not produce a polymyxin or a tridecaptin or does not produce a polymyxin or a tridecaptin and does preferably not produce a DAB comprising compound.

[0012] In a further embodiment the mixture comprises a microorganism of b) selected from Azotobacter, Azospirillum, Pseudomonas, Paraburkholderia, Rhizobium, Bradyrhizobium, Bacillus or Streptomyces, preferably selected from the species Pseudomonas koreensis, Pseudomonas gessardii, Pseudomonas chlororaphis, Paraburkholderia phytofirmans, Rhizobium phaseoli, Rhizobium radiobacter, Bradyrhizobium japonicum, Bacillus licheniformis, Bacillus subtilis, Bacillus amyloliquefaciens, Bacillus licheniformis, Bacillus mycoides, Bacillus firmus, Bacillus thuringiensis, Bacillus pumilus, Bacillus simplex, Streptomyces griseoviridis and Streptomyces lydicus.

[0013] The invention comprises also Paenibacillus species strains producing more of at least one glutamine comprising fusaricidin, paeniprolixin or paeniserine than of its respective asparagine comprising counterpart, preferably the Paenibacillus species strains produce more fusaricidin LiF04b (Fus B) than fusaricidin LiF04a (Fus A).

[0014] The invention comprises also agrochemical compositions comprising at least one of the Paenibacillus species strains of the invention.

[0015] The invention comprises also whole culture broths, cell-free culture broths, spores or cell-free extracts of a Paenibacillus species strain of the invention.

[0016] Further embodiments of the invention are methods for controlling, suppressing or preventing fungal infection of plants comprising the steps of a) providing a pure culture of a Paenibacillus species strain of the invention or a mixture comprising such a Paenibacillus species strain or a whole culture broth, a cell-free culture broth or a cell-free extract of a Paenibacillus species strain of the invention or an agrochemical composition comprising at least one of the above and b) applying an effective amount of the pure culture of a Paenibacillus species strain of the invention, or a mixture comprising such a Paenibacillus species strain or a whole culture broth, a cell-free culture broth or a cell-free extract of a Paenibacillus species strain of the invention or an agrochemical composition comprising at least one of the above to the plant pathogenic fungi, their habitat, the host plants, plant propagation material or the soil used to grow the plant.

[0017] The invention also provides isolated Paenibacillus exopolysaccharides which does not comprise colistin, tridecaptin M or both and preferably do not comprise a polymyxin or tridecaptin and even more preferred do not comprise any DAB comprising compound.

[0018] In one embodiment the Paenibacillus exopolysaccharides are comprised in a composition also comprising at least one of a) to c) being: a) an auxiliary, b) a pure culture of microorganism which is sensitive to the presence of colistin, tridecaptin M or both, preferably is sensitive to the presence of at least one polymyxin or at least one tridecaptin and even more preferred is sensitive to the presence of at least one DAB comprising compound, or c) a fertilizer. The invention comprises also plant propagation material comprising a pure culture of a Paenibacillus species strain of the invention, or an agrochemical composition or a mixture comprising such a strain, or a whole culture broth, a cell-free culture broth or a cell-free extract comprising or prepared from such strain, or isolated Paenibacillus exopolysaccharides of the invention.

[0019] The invention further provides for a method of production of a valuable product comprising, a) culturing a Paenibacillus species strain of the invention and b) harvesting the valuable product. Preferably the valuable product is a) an enzyme or a protein, b) an antifungal compound, c) an exopolysaccharide, d) one or more DAB comprising compounds or e) 2,3-Butanediol, lactic acid or acetoin.

[0020] Another embodiment of the invention is a method to create a Paenibacillus species strain of the invention, comprising the following steps of a) providing a Paenibacillus species parent strain, b) providing stress to a culture of the Paenibacillus species parent strain of a), c) culturing the stressed Paenibacillus species parent strain of b) and d) isolating a pure culture of a Paenibacillus species strain not producing colistin, tridecaptin M or both and preferably not comprising a polymyxin or a tridecaptin and even more preferred not comprising any DAB comprising compound.

### BRIEF DESCRIPTION OF THE DRAWINGS

[0021] FIG. 1 shows an agar plate in which colonies of mutated LU17007 are overlaid with a top agar culture of E. coli after 48 h of incubation. A mutant colony of LU17007 lacking an inhibition zone against E. coli is marked with a square.

### DETAILED DESCRIPTION

[0022] The present invention may be understood more readily by reference to the following detailed description of the embodiments of the invention and the examples included herein. Although the present invention will be described with respect to particular embodiments, this description is not to be construed in a limiting sense.

### Definitions

[0023] Unless otherwise noted, the terms used herein are to be understood according to conventional usage by those of ordinary skill in the relevant art.

[0024] Before describing in detail exemplary embodiments of the present invention, definitions important for understanding the present invention are given. Unless stated otherwise or apparent from the nature of the definition, the definitions apply to all compounds, methods and uses described herein.

[0025] As used in this specification and in the appended claims, the singular forms of “a” and “an” also include the respective plurals unless the context clearly dictates otherwise.

[0026] In the context of the present invention, the terms “about” and “approximately” denote an interval of accuracy that a person skilled in the art will understand to still ensure the technical effect of the feature in question. The term typically indicates a deviation from the indicated numerical value of ±20%, preferably ±15%, more preferably ±10%, and even more preferably ±5%. Furthermore, the terms “first”, “second”, “third” or “(a)”, “(b)”, “(c)”, “(d)” etc. and the like in the description and in the claims, are used for distinguishing between similar elements and not necessarily for describing a sequential or chronological order. It is to be understood that the terms so used are interchangeable under appropriate circumstances and that the embodiments of the invention described herein are capable of operation in other sequences than described or illustrated herein. In case the terms “first”, “second”, “third” or “(a)”, “(b)”, “(c)”, “(d)”, “i”, “ii” etc. relate to steps of a method or use or assay there is no time or time interval coherence between the steps, i.e. the steps may be carried out simultaneously or there may be time intervals of seconds, minutes, hours, days, weeks, months or even years between such steps, unless otherwise indicated in the application as set forth herein above or below.

[0027] Throughout this application, various publications are referenced. The disclosures of all of these publications and those references cited within those publications in their entireties are hereby incorporated by reference into this application in order to more fully describe the state of the art to which this invention pertains.

[0028] It is to be understood that the term “comprising” is not limiting. For the purposes of the present invention the term “consisting of” is considered to be a preferred embodiment of the term “comprising”. If hereinafter a group is defined to comprise at least a certain number of embodiments, this is meant to also encompass a group which preferably consists of these embodiments only. “Parent” sequence (also called “parent enzyme” or “parent protein”) is the starting sequences for introduction of changes (e.g. by introducing one or more amino acid substitutions) of the sequence resulting in “variants” of the parent sequences. Thus, the term “enzyme variant” or “sequence variant” or “protein variant” are used in reference to parent enzymes that are the origin for the respective variant enzymes. Therefore, parent enzymes include wild type enzymes and variants of wild-type enzymes which are used for development of further variants. Variant enzymes differ from parent enzymes in their amino acid sequence to a certain extent.

[0029] In describing the variants of the present invention, the abbreviations for single amino acids used according to the accepted IUPAC single letter or three letter amino acid abbreviation is used.

[0030] “Amino acid alteration” as used herein refers to amino acid substitution, deletion, or insertion.

[0031] “Substitutions” are described by providing the original amino acid followed by the number of the position within the amino acid sequence, followed by the substituted amino acid. For example, the substitution of histidine at position 120 with alanine is designated as “His120Ala” or

[0032] “H120A”. Substitutions can also be described by merely naming the resulting amino acid in the variant without specifying the amino acid of the parent at this position, e.g., “X120A” or “120A” or “Xaa120Ala” or “120Ala”.

[0033] “Deletions” are described by providing the original amino acid followed by the number of the position within the amino acid sequence, followed by *. Accordingly, the deletion of glycine at position 150 is designated as “Gly150*” or G150*”. Alternatively, deletions are indicated by e.g. “deletion of D183 and G184”.

[0034] “Insertions” are described by providing the original amino acid followed by the number of the position within the amino acid sequence, followed by the original amino acid and the additional amino acid. For example, an insertion at position 180 of lysine next to glycine is designated as “Gly180GlyLys” or “G180GK”. When more than one amino acid residue is inserted, such as e.g. a Lys and Ala after Gly180 this may be indicated as: Gly180GlyLysAla or G195GKA.

[0035] In cases where a substitution and an insertion occur at the same position, this may be indicated as S99SD+S99A or in short S99AD. In cases where an amino acid residue identical to the existing amino acid residue is inserted, it is clear that degeneracy in the nomenclature arises. If for example a glycine is inserted after the glycine in the above example this would be indicated by G180GG. Variants comprising multiple alterations are separated by “+”, e.g., “Arg170Tyr+Gly195Glu” or “R170Y+G195E” representing a substitution of arginine and glycine at positions 170 and 195 with tyrosine and glutamic acid, respectively. Alternatively, multiple alterations may be separated by space or a comma, e.g., R170Y G195E or R170Y, G195E respectively. Where different alternative alterations can be introduced at a position, the different alterations are separated by a comma, e.g., “Arg170Tyr, Glu” and R170T, E, respectively, represents a substitution of arginine at position 170 with tyrosine or glutamic acid. Alternative substitutions at a particular position can also be indicated as X120A,G,H, 120A,G,H, X120A/G/H, or 120A/G/H. Alternatively, different alterations or optional substitutions may be indicated in brackets, e.g., Arg170[Tyr, Gly] or Arg170{Tyr, Gly} or in short R170 [Y, G] or R170 {Y, G}.

[0036] A “synthetic” or “artificial” compound is produced by in vitro chemical and/or enzymatic synthesis.

[0037] The term “native” (or naturally occurring or wildtype or endogenous) cell or organism or polynucleotide or polypeptide refers to the cell or organism or polynucleotide or polypeptide as found in nature (i.e., without there being any human intervention). For the purposes of the invention, “recombinant” (or transgenic) with regard to a cell or an organism means that the cell or organism contains a heterologous polynucleotide which is introduced by man by gene technology and with regard to a polynucleotide includes all those constructions brought about by man by gene technology/recombinant DNA techniques in which either
[0038] (a) the sequence of the polynucleotide or a part thereof, or
[0039] (b) one or more genetic control sequences which are operably linked with the polynucleotide, including but not limited thereto a promoter, or
[0040] (c) both a) and b) are not located in their wildtype genetic environment or have been modified by man.

[0041] The term “heterologous” (or exogenous or foreign or recombinant or non-native) polypeptide is defined herein as a polypeptide that is not native to the host cell, a polypeptide native to the host cell in which structural modifications, e.g., deletions, substitutions, and/or insertions, have been made by recombinant DNA techniques to alter the native polypeptide, or a polypeptide native to the host cell whose expression is quantitatively altered or whose expression is directed from a genomic location different from the native host cell as a result of manipulation of the DNA of the host cell by recombinant DNA techniques, e.g., a stronger promoter. Similarly, the term “heterologous” (or exogenous or foreign or recombinant or non-native) polynucleotide refers to a polynucleotide that is not native to the host cell, a polynucleotide native to the host cell in which structural modifications, e.g., deletions, substitutions, and/or insertions, have been made by recombinant DNA techniques to alter the native polynucleotide, or a polynucleotide native to the host cell whose expression is quantitatively altered as a result of manipulation of the regulatory elements of the polynucleotide by recombinant DNA techniques, e.g., a stronger promoter, or a polynucleotide native to the host cell, but integrated not within its natural genetic environment as a result of genetic manipulation by recombinant DNA techniques. With respect to two or more polynucleotide sequences or two or more amino acid sequences, the term “heterologous” is used to characterize that the two or more polynucleotide sequences or two or more amino acid sequences are naturally not occurring in the specific combination with each other.

[0042] Variant polynucleotide and variant polypeptide sequences may be defined by their sequence identity when compared to a parent sequence. Sequence identity usually is provided as “% sequence identity” or “% identity”. For calculation of sequence identities, in a first step a sequence alignment is produced. According to this invention, a pairwise global alignment is produced, meaning that two sequences are aligned over their complete length, which is usually produced by using a mathematical approach, called alignment algorithm.

[0043] According to the invention, the alignment is generated by using the algorithm of Needleman and Wunsch (J. Mol. Biol. (1979) 48, p. 443-453). Preferably, the program “NEEDLE” (The European Molecular Biology Open Software Suite (EMBOSS)) is used for the purposes of the current invention, with using the programs default parameter (polynucleotides: gap open=10.0, gap extend=0.5 and matrix=EDNAFULL; polypeptides: gap open=10.0, gap extend=0.5 and matrix=EBLOSUM62). After aligning two sequences, in a second step, an identity value is determined from the alignment produced. For this purpose, the %-identity is calculated by dividing the number of identical residues by the length of the alignment region which is showing the respective sequence of the present invention over its complete length multiplied with 100: %-identity=(identical residues/length of the alignment region which is showing the respective sequence of the present invention over its complete length)*100.

[0044] For calculating the percent identity of two nucleic acid sequences the same applies as for the calculation of percent identity of two amino acid sequences with some specifications. For nucleic acid sequences encoding for a protein the pairwise alignment shall be made over the complete length of the coding region of the sequence of this invention from start to stop codon excluding introns. Introns present in the other sequence, to which the sequence of this invention is compared, may also be removed for the pairwise alignment. Percent identity is then calculated by %-identity=(identical residues/length of the alignment region which is showing the sequence of the invention from start to stop codon excluding introns over their complete length)*100. After aligning two sequences, in a second step, an identity value is determined from the alignment produced.

[0045] Moreover, the preferred alignment program for nucleic acid sequences implementing the Needleman and Wunsch algorithm (J. Mol. Biol. (1979) 48, p. 443-453) is “NEEDLE” (The European Molecular Biology Open Software Suite (EMBOSS)) with the programs default parameters (gapopen=10.0, gapextend=0.5 and matrix=EDNAFULL).

[0046] Sequences, having identical or similar regions with a sequence of this invention, and which shall be compared with a sequence of this invention to determine % identity, can easily be identified by various ways that are within the skill in the art, for instance, using publicly available computer methods and programs such as BLAST, BLAST-2, available for example at NCBI.

[0047] Variant polypeptides may be defined by their sequence similarity when compared to a parent sequence. Sequence similarity usually is provided as “% sequence similarity” or “%-similarity”. % sequence similarity takes into account that defined sets of amino acids share similar properties, e.g. by their size, by their hydrophobicity, by their charge, or by other characteristics. Herein, the exchange of one amino acid with a similar amino acid may be called “conservative mutation”. Similar amino acids according to the invention are defined as follows, which shall also apply for determination of %-similarity according to this invention, which is also in accordance with the BLOSUM62 matrix as for example used by program “NEEDLE”, which is one of the most used amino acids similarity matrix for database searching and sequence alignments:
[0048] Amino acid A is similar to amino acids S
[0049] Amino acid D is similar to amino acids E; N
[0050] Amino acid E is similar to amino acids D; K; Q
[0051] Amino acid F is similar to amino acids W; Y
[0052] Amino acid H is similar to amino acids N; Y
[0053] Amino acid I is similar to amino acids L; M; V
[0054] Amino acid K is similar to amino acids E; Q; R
[0055] Amino acid L is similar to amino acids I; M; V
[0056] Amino acid M is similar to amino acids I; L; V
[0057] Amino acid N is similar to amino acids D; H; S
[0058] Amino acid Q is similar to amino acids E; K; R
[0059] Amino acid R is similar to amino acids K; Q
[0060] Amino acid S is similar to amino acids A; N; T
[0061] Amino acid T is similar to amino acids S
[0062] Amino acid V is similar to amino acids I; L; M
[0063] Amino acid W is similar to amino acids F; Y
[0064] Amino acid Y is similar to amino acids F; H; W

[0065] Conservative amino acid substitutions may occur over the full length of the sequence of a polypeptide sequence of a functional protein such as an enzyme. In one embodiment, such mutations are not pertaining the functional domains of an enzyme. In one embodiment, conservative mutations are not pertaining the catalytic centers of an enzyme. For calculation of sequence similarity, in a first step a sequence alignment is produced as described above. After aligning two sequences, in a second step, a similarity value is determined from the alignment produced. For this purpose, the %-similarity is calculated by dividing the number of identical residues plus the number of similar residues by the length of the alignment region which is showing the sequence of the invention over its complete length multiplied with 100: %−similarity=[(identical residues+similar residues)/length of the alignment region which is showing the sequence of the invention over its complete length]*100.

[0066] The term “ANI-Value” is based on the Average Nucleotide Identity (ANI) between two microbial genomes. An ANI-Value is provided in %, in which higher values point to a high similarity between the genomes in question.

[0067] The ANI-Value as used herein refers to a Value calculated based on the FastANI method described for the version FastANI (v1.0) in Jain, C. et al. High throughput ANI analysis of 90K prokaryotic genomes reveals clear species boundaries. Nat Commun 9, 5114 (2018). https://doi.org/i0.1038/s41467-018-07641-9. The ANI-Value is preferably calculated based on the most recent version of the method. In case different versions provide different ANI-Values, the value of the version FastANI v1.33 will be decisive. Usually, a value of less than 95% is used to distinguish the genomes of two different species. However, this value is flexible and depends on the individual situation. For example, based on the results of Murray, C. S., Gao, Y. & Wu, M. Re-evaluating the evidence for a universal genetic boundary among microbial species. Nat Commun 12, 4059 (2021). https://doi.org/10.1038/s41467-021-24128-2, an ANI-Value of less than 95% person will not be correct in every case to determine that two microorganisms in question belong to different species.

[0068] For calculating the ANI-Value, the following parameters are set to I is set to 3 Kbp, T is set to 50, wherein the two sequence sets to be compared need to have at least 150Kbp homologous genome sequence. The ANI-Value calculated with the FastANI method is usually robust even if the analyzed sequence data sets have variable assembly quality, completeness, and contamination. Preferably the datasets to be compared have at least 15 times, preferably 20 times, coverage and are at least 99% complete with have less than 2% contamination. The sequence datasets can be created using Illumina HiSeq 2500 DNA sequencing technology or similar technologies available in the art. Preferably sequencing technologies creating long-read sequences are used, like Nanopore Sequencing or Single Molecule, Real-Time (SMRT) Sequencing, also known under the name PACBIO® sequencing. Even more preferred, the datasets are prepared using a combination of Illumina HiSeq 2500 DNA sequencing and a technology creating long-read sequences.

[0069] The terms “coverage”, “complete, and “contamination” are terms used in the art to describe the quality of a certain data set for a sequenced genome. A 15 times coverage refers to how many times, on average, a certain position in a genome has been sequenced e.g., for a genome size of 5 megabases (MB), 100 MB of DNA sequencing from the given genome is required to have 15 times sequencing coverage on average at each position along the genome. The completeness of a sequenced genome and the amount of contamination is calculated by using defined sets of marker genes. Preferably by using the CheckM or BUSCO methods, see Parks et al 2015, CheckM: assessing the quality of microbial genomes recovered from isolates, single cells, and metagenomes. Genome research, 25(7), 1043-1055, and Felipe et al, 2015, BUSCO: assessing genome assembly and annotation completeness with single-copy orthologs, Bioinformatics, Volume 31, Issue 19, 1 Oct. 2015, Pages 3210-3212. Preferably these methods are used in their most recent version of the method. In case different versions of the methods provide different results, the results of the version CheckM v1.1. and BUSCO v5.2.2 will be decisive. In case the CheckM and BUSCO methods provide different results, the result of the BUSCO method will be decisive.

[0070] The term “genetic locus” is a specific, position on a microbial chromosome or plasmid where a particular gene or genetic marker is located. A duplication of genes results in the occurrence of the same genetic sequence, or a very similar one, in two different genetic loci in the genome or plasmid.

[0071] The term “open reading frame” or “ORF” refers to the part of a gene sequence, which encodes a protein or polypeptide sequence. It is a continuous stretch of codons that may begin with a start codon (usually AUG) and ends at a stop codon (usually UAA, UAG or UGA). An ATG codon within the ORF (not necessarily the first) may indicate where translation starts. The transcription termination site is located after the ORF, beyond the translation stop codon.

[0072] The term “spores” refers to at least one dormant (at application) but viable reproductive unit of a bacterial species. It is further recognized that the spores disclosed herein are produced via culturing of bacteria and are usually harvested from the fermentation broth by techniques used in the art, like centrifugation or filtration. They can therefore comprise a combination of vegetative cells and forespores (cells in an intermediate stage of spore formation); a combination of forespores and spores; or a combination of forespores, vegetative cells and/or spores, as well as other solid components of the fermentation broth.

[0073] The term “pure culture” refers to a community of microorganisms which belong to the same strain and show only phenotypic and/or genotypic variation which is due to different physiological states, epigenetic modifications, or the natural frequency of mutation of the specific strain. In many cases will a pure culture of a microorganism show some degree of domestication, meaning that it comprises genotypic traits, which lead to advantageous phenotypic traits for cultivation on or in artificial growth media or for industrial production and appear rarely under growth conditions of the natural habitat. A pure culture of a given microorganism may be combined with one or more pure cultures of other microorganisms. However, based on the genetic similarity of all cells of a single pure culture will mixtures of pure cultures of many different strains, e.g. up to 100 different pure cultures, not reach the genetic complexity of a natural microbiome or a sample of microorganisms freshly isolated from nature. The Paenibacillus species strains herein as well as their potential mixing partners will preferably be used as pure cultures.

[0074] The term “strain” refers a group of microorganisms exhibiting the same phenotypic and/or genotypic traits, except for variations based on the natural rate of mutation, which share the same lineage back to a single isolate, distinct from those of other isolates or strains of the same species and have, except for small variations, the same genome sequence.

[0075] The term “whole culture broth” refers to a combination to the result of remaining components of a culture broth used to grow a microorganism, the produced biomass of the microorganism, in particular cells and/or spores of the microorganism, and other components produced during culturing of the microorganism, like secondary compounds produced by the microorganism. Usually, the whole culture broth is concentrated and purified to a certain degree, e.g. in case the whole culture broth is concentrated via filtration. Accordingly, the term whole culture broth also encompasses these modified forms as long as they are liquid to a certain degree and comprise biomass of the microorganism and components of the culture broth used to grow the microorganism. The biomass of the microorganism usually comprises a mixture of living, dormant and dead cells. In some cases, the biomass of the microorganism is killed by intention.

[0076] The term “cell-free culture broth” refers to the liquid parts of a culture broth used to grow a microorganism after the biomass of the microorganism has been removed by techniques known in the art. The cell-free culture broth may be further concentrated after removal of the biomass and may further be purified but will still comprise components of the medium used to grow the microorganism and compounds produced by the microorganism. Thus, the term cell-free culture broth” is intended to encompass such modified forms of the liquid part of the culture broth. Preferably, the cell-free culture broth will still comprise some parts of the microorganism, like remaining DNA, proteins or characteristic combination of secondary compounds, which allow to identify which species and/or strain had been used to produce the cell-free culture broth.

[0077] The term “cell-free extract” refers to an extract of the vegetative cells, spores and/or the whole culture broth of a microorganism comprising cellular metabolites produced by the respective microorganism obtainable by cell disruption methods known in the art such as solvent based (e.g. organic solvents such as alcohols sometimes in combination with suitable salts), temperature-based, application of shear forces, cell disruption with an ultrasonicator. The desired extract may be concentrated by conventional concentration techniques such as drying, evaporation, centrifugation or alike. Certain washing steps using organic solvents and/or water-based media may also be applied to the crude extract preferably prior to use.

[0078] The term “DAB comprising compound” or DAB comprising compounds” refer to compounds in which L-2,4-diaminobutanoate (DAB) is used as a precursor or intermediate during their biosynthesis in a way that at least some atoms of the DAB molecules are incorporated in a compound. DAB comprising compounds in a stricter sense are compounds selected from polymyxins, tridecaptins, polypeptin, paenilipoheptins, octapeptins, jolipeptin, gavaserin and saltavalin.

[0079] The term “polymyxins” refers to lipo-decapeptides containing from five to six DAB residues, wherein seven amino acid residues form a cyclic component, while the other three extend from one of the cyclic residues as a linear chain terminating in either 6-methyloctanoic acid or 6-methylheptanoic acid at the N-terminus. Polymyxins are well known in the art and comprise several variants based on differences in amino acid or fatty acid composition. Known polymyxin variants are polymyxin A, B, B-I, C, D, E1 (colistin A), E2 (colistin B), F, M (mattacin), P, S1, and T1. The frequently used variant name polymyxin B refers to a mixture composed of polymyxins B1, B1-1, B2, B3, and B6. Structural information on these variants can for example be found in Stephen A. Cochrane and John C. Vederas, 2016, Lipopeptides from Bacillus and Paenibacillus spp.: A Gold Mine of Antibiotic Candidates Medicinal Research Reviews, 36, No. 1, 4-31 and in Niu et al. 2013, Polymyxin P is the active principle in suppressing phytopathogenic Erwinia spp. by the biocontrol rhizobacterium Paenibacillus polymyxa M-1. BMC Microbiol; 13:137.

[0080] Gene clusters responsible for polymyxin biosynthesis (pmx cluster) have been described for several Paenibacillus strains. The pmx cluster encompasses five genes, of which pmxA, pmxB, and pmxE encode the polymyxin synthetase, whereas pmxD and pmxC are involved in polymyxin transport. Further information on the pmx cluster can be found in Aleti et al (2015) Genome mining: prediction of lipopeptides and polyketides from Bacillus and related Firmicutes, Comput Struct Biotechnol J 13:192-203, and in Choi et al, 2009, Identification of a polymyxin synthetase gene cluster of Paenibacillus polymyxa and heterologous expression of the gene in Bacillus subtilis. J Bacteriol 191(10):3350-3358.

[0081] The term “tridecaptins” refers to linear tridecapeptides with a combination of L and D amino acids that are acylated with a 6-methyloctanoic or a C9 to C13 β-hydroxy fatty acid side chain linked to their N-terminal amino acid. Tridecaptins are well known and at least ten variants have been described in the art. These variants are tridecaptin Aα, Aβ, A4, Bα, Bβ, Bγ, Bδ, Cα, Cβ, E and M. Structural information on tridecaptin variants can be found in Stephen A. Cochrane and John C. Vederas, 2016, Lipopeptides from Bacillus and Paenibacillus spp.: A Gold Mine of Antibiotic Candidates Medicinal Research Reviews, 36, No. 1, 4-31. Gene clusters responsible for tridecaptin biosynthesis (tri cluster) have been described for several Paenibacillus strains. Tri cluster generally encompass five genes which have been named trbA, trbB, trbC, trbD and trbE or triA to triE or trmA to trmE by different authors. Sequence information tri cluster have been, for example, deposited under GenBank accession no.: KF111342 and KR422398.

[0082] TrbA encodes a putative thioesterase, TrbB and TrbC encode ABC transporter proteins and TrbD and TrbE encode contain ten and three adenylation domains for the synthesis of the polypeptide chain. Sequence searches can identify variants of these clusters, e.g. the variant for the production of tridecaptin M, see Jangra et al., 2019, Tridecaptin M, a new variant discovered in mud bacterium, shows activity against colistin- and extremely drug-resistant Enterobacteriaceae, Antimicrob Agents Chemother 63:e00338-19, which also describes the structure of tridecaptin M. The structure of tridecaptin E is described in Vater et al., 2018, Genome Mining of the Lipopeptide Biosynthesis of Paenibacillus polymyxa E681 in Combination with Mass Spectrometry: Discovery of the Lipoheptapeptide Paenilipoheptin, ChemBioChem, 19, 744-753.

[0083] The term “polypeptin” refers to natural compounds which have a general structure composed of a cyclic nonapeptide moiety and a R-hydroxy fatty acid. They have been described by several research groups and are also known under the names pelgipeptins, permetins or pelgipeptins, see Mountford et al., 2017, The first total synthesis and solution structure of a polypeptin, PE2, a cyclic lipopeptide with broad spectrum antibiotic activity Org. Biomol. Chem., 15, 7173. Additional information on the structures of polypeptins and an exemplary gene cluster (plp cluster) can be found in Qian et al., 2012, Identification and functional analysis of gene cluster involvement in biosynthesis of the cyclic lipopeptide antibiotic pelgipeptin produced by Paenibacillus elgii, BMC Microbiology, 12:197, and in Stephen A. Cochrane and John C. Vederas, 2016, Lipopeptides from Bacillus and Paenibacillus spp.: A Gold Mine of Antibiotic Candidates Medicinal Research Reviews, 36, No. 1, 4-31.

[0084] The term “paenilipoheptins” refers to natural compounds comprising a cyclic heptapeptide moiety rich in aromatic amino-acid components (Phe, Tyr, Trp) and contain a C12 or C13 β-amino fatty acid that is linked through its amino group with the COOH group of the C-terminal Glu. One paenilipoheptin has the sequence of Ser-DAB-Trp-Val-Phe-Tyr-Glu in its heptapeptide structure. Further structural information on paenilipoheptins can be found in Vater et al., 2018, Genome Mining of the Lipopeptide Biosynthesis of Paenibacillus polymyxa E681 in Combination with Mass Spectrometry: Discovery of the Lipoheptapeptide Paenilipoheptin, ChemBioChem, 19, 744-753

[0085] The term “octapeptins” refers to natural DAB comprising compounds comprising eight monomers having a general structure composed of a cyclic heptapeptide moiety and a side chain. The group of octapeptins comprise several well-known variants: octapeptin A1 (synonym EM 49β), A2 and A3 unified under the synonym EM49α, octapeptin B1 (synonymEM49δ), B2 and B3 unified under the synonym EM 496, octapeptin B5 (synonym battacin), octapeptin Cl (synonym 333-25), D, Bu-1880, Y-8495, and Bu-2470, see Meyers et al., 1976, A nomenclature proposal for the octapeptin antibiotics. J Antibiot (Tokyo) 29(11):1241-1242, Sugawara K, et al. 1983. Bu-2470, a new peptide antibiotic complex. II. Structure determination of Bu-2470 A, B1, B2a and B2b. J. Antibiot. 36: 634-638 and Qian et al, 2012, battacin (octapeptin B5), a New Cyclic Lipopeptide Antibiotic from Paenibacillus tianmuensis Active against Multidrug-Resistant Gram-Negative Bacteria Antimicrobial Agents and Chemotherapy, Vol. 56/3, 1458-1465. An octapeptin biosynthetic cluster has been described in B. circulans ATCC 31805 in Velkov et al., 2018, Structure, function, and biosynthetic origin of octapeptin antibiotics active against extensively drug-resistant gramnegative bacteria. Cell Chem Biol 25(4):380-391 e5 to comprise three nonribosomal peptide synthetases OctA, OctB, and OctC

[0086] The term “gavaserin” refers to a cyclic octapeptid of a molecular masse of 911 Daltons, comprising Glu, Ala, 2×Val, Ser, 3×DAB and octanoic acid. More information can be found in Pichard et al., 1995, Gavaserin and saltavalin, new peptide antibiotics produced by Bacillus polymyxa. FEMS Microbiol Lett 133(3):215-218. No structural data about this LP as well as gene encoding its production are available.

[0087] The term “saltavalin” refers to a non-cyclic peptide having a molecular masse of about 903 Daltons and comprising Ser, Ala, 2×Leu, 2×Thr, Val, and 2×DAB acid with no fatty acid component attached. More information can be found in Pichard et al., 1995, Gavaserin and saltavalin, new peptide antibiotics produced by Bacillus polymyxa. FEMS Microbiol Lett 133(3):215-218. No structural data about this LP as well as gene encoding its production are available.

[0088] The term “jolipeptin” refers to cyclic polypeptides comprising Ser, Ala, Val, Gly, Glu and DAB. Further features and antimicrobial spectrum of Jolipeptin has been described in Ito and Koyama, 1971, LOCALIZATION OF JOLIPEPTIN AND COLISTIN IN THEIR PRODUCING STRAIN, BACILLUS POLYMYXA VAR. COLISTINUS, THE JOURNAL OF ANTIBIOTICS, VOL. XXV NO. 2, 147 to 148 and Ito and Koyama, 1972, JOLIPEPTIN, A NEW PEPTIDE ANTIBIOTIC I. ISOLATION, PHYSICO-CHEMICAL AND BIOLOGICAL CHARACTERISTICS, THE JOURNAL OF ANTIBIOTICS, VOL. XXV NO. 5, 304 to 308.

[0089] The term “fusaricidin compounds” refers to a group of about 80 cyclic or acyclic lipohexapeptides containing a 15-Guanidino-3-hydroxypentadecanoic acid (GHPD), 17-Guanidino-3-hydroxyheptadecanoic acid (GHHD) or a 19-Guanidino-3-hydroxynonadecanoic acid (GHND) component, see Vater et al., 2017, Fusaricidins from Paenibacillus polymyxa M-1, a family of lipohexapeptides of unusual complexity—a mass spectrometric study, J. Mass Spectrom., 52, 7-15. The hexapeptide part comprises, in single amino acid code, a T or S in position 1, a I or V in position 2, a V or I or Y or F in position 3, a T or S in position 4, a N or Q at position 5 and an A on position 6. Fusaricidin compounds comprising 15-Guanidino-3-hydroxypentadecanoic acid component are called fusaricidins. Fusaricidin compounds comprising a 17-Guanidino-3-hydroxyheptadecanoic acid or a 19-Guanidino-3-hydroxynonadecanoic acid are usually called paeniprolixins. Fusaricidin compounds comprising a S in the hexapeptide part are usually called paeniserines. Some examples for fusaricidins, paeniprolixins and paeniserines are listed in Table 1.

TABLE 1

| Name | Form | Fatty Acid | Amino acid sequence |
|---|---|---|---|
| Fusaricidin LiF03a | cyclic | GHPD | TVYTNA |
| Fusaricidin LiF03b | cyclic | GHPD | TVYTQA |
| Fusaricidin LiF04a (FUS A) | cyclic | GHPD | TVVTNA |
| Fusaricidin LiF04b (FUS B) | cyclic | GHPD | TVVTQA |
| Fusaricidin LiF05a | cyclic | GHPD | TVITNA |
| Fusaricidin LiF05b | cyclic | GHPD | TVITQA |
| Fusaricidin LiF06a | cyclic | GHPD | TIVTNA |
| Fusaricidin LiF06b | cyclic | GHPD | TIVTQA |
| Fusaricidin LiF07a | cyclic | GHPD | TVFTNA |
| Fusaricidin LiF07b | cyclic | GHPD | TVFTQA |
| Paeniprolixin C1 | cyclic | GHHD | TIITNA |
| Paeniprolixin C2 | cyclic | GHHD | TIITQA |
| Paeniserine A1 | cyclic | GHPD | SVVTNA |
| Paeniserine A2 | cyclic | GHPD | SVVTQA |

[0090] Further examples are described in Qiu et al., 2019, Identification of fusaricidins from the antifungal microbial strain Paenibacillus sp. MS2379 using ultra-high performance liquid chromatography coupled to quadrupole time-of-flight mass spectrometry, Journal of Chromatography A, 1586, 91-100.

[0091] Several gene cluster (fus cluster) for the production of fusaricidin compounds have been described in the art, see for example: Li et Jensen, 2008, Nonribosomal Biosynthesis of Fusaricidins by Paenibacillus polymyxa PKB1 Involves Direct Activation of a D-Amino Acid, Chemistry & Biology 15, 118-127 and Choi et al., 2008, Identification and functional analysis of the fusaricidin biosynthetic gene of Paenibacillus polymyxa E681. Biochem. Biophys. Res. Commun. 365, 89-95. doi: 10.1016/j.bbrc.2007.10.147. Targeted modifications of fusaricidin compound producing genes have also been done, see for example: Han et al., 2012, Site-directed modification of the adenylation domain of the fusaricidin nonribosomal peptide synthetase for enhanced production of fusaricidin analogs. Biotechnol Lett.; 34:1327-34.

[0092] The term “levan” refers to a linear β-(2→6)-linked polyfructan. Levans are produced from sucrose-based substrate by a transfructosylation reaction of levansucrase (beta-2,6-fructan:D-glucose-fructosyl transferase, EC 2.4.1.10). Further information on levan can be found in Liu et al. Preparation, antioxidant and antitumor activities in vitro of different derivatives of levan from endophytic bacterium Paenibacillus polymyxa EJS-3. Food Chem. Toxicol. 2012, 50, 767-772.

[0093] The term “paenan” refers to a heteropolysaccharide comprising glucose, mannose, galactose, and glucuronic acid in the ratio 3.5:2:1:0.1 produced by Paenibacillus species. Composition and rheological properties of paenan have been described in Rutering et al, 2018, Rheological characterization of the exopolysaccharide Paenan in surfactant systems, Carbohydrate Polymers, 181, 719-726 and in Rutering et al., 2016, Controlled production of polysaccharides-exploiting nutrient supply for levan and heteropolysaccharide formation in Paenibacillus sp., Carbohydrate Polymers, 148, 326-334.

[0094] The term “curdlan” refers to a polysaccharide composed exclusively of beta-1,3-linked glucose residues. More information on Curdlan production in Paenibacillus species can be found in Rafigh et al, 2014, Optimization of culture medium and modeling of curdlan production from Paenibacillus polymyxa by RSM and ANN, International Journal of Biological Macromolecules 70, 463-473

### DETAILED DESCRIPTION

[0095] Described herein are Paenibacillus species strains comprising only one genetic locus comprising in the order of rising preference, at least 95%, 96%, 97%, 98%, 99%, or 100% sequence identity to a polynucleotide sequence of any one of SEQ IN NOs: 222, 223, 224, 225, 413, 414, 415, 416, 417, 418 and not comprising an open reading frame for a diaminobutyrate-2-oxoglutarate-transaminase comprising, in the order of rising preference, an amino acid sequence of at least 90%, 92,%, 93%, 94%, 95%, 96%, 97%, 98%, 99% or 100% sequence identity to SEQ ID NO: 217.

[0096] In one embodiment the Paenibacillus species strains comprise only one genetic locus comprising in the order of rising preference, at least 95%, 96%, 97%, 98%, 99%, or 100% sequence identity to a polynucleotide sequence of any one of SEQ ID NOs: 224, 225, 413, 414, 415, 416, 417, 418 and does not comprise an open reading frame for a diaminobutyrate-2-oxoglutarate-transaminase comprising, in the order of rising preference, an amino acid sequence of at least 90%, 92,%, 93%, 94%, 95%, 96%, 97%, 98%, 99% or 100% sequence identity to SEQ ID NO: 217.

[0097] In one embodiment the Paenibacillus species strains comprise only one genetic locus comprising in the order of rising preference, at least 98%, or 99%, or 100% sequence identity to a polynucleotide sequence of any one of SEQ IN NOs: 413, 414, 415, 416, 417, 418 and does not comprise an open reading frame for a diaminobutyrate-2-oxoglutarate-transaminase comprising, in the order of rising preference, an amino acid sequence of at least 90%, 92,%, 93%, 94%, 95%, 96%, 97%, 98%, 99% or 100% sequence identity to SEQ ID NO: 217.

[0098] The strains may belong to any Paenibacillus species but belong preferably to a species selected from Paenibacillus polymyxa, Paenibacillus peoriae, Paenibacillus sp. aloe-11, Paenibacillus kribbensis and Paenibacillus terrae. More preferred they are Paenibacillus polymyxa strains.

[0099] It is not uncommon in the art that certain microorganisms are reclassified to belong to a different species, or that certain strains of unknown phylogenetic relationship are reclassified to belong to a certain species, for example see Kwak et al., 2020, Genome-based reclassification of Paenibacillus jamilae Aguilera et al. 2001 as a later heterotypic synonym of Paenibacillus polymyxa (Prazmowski 1880) Ash et al. 1994, Int. J. Syst. Evol. Microbiol.; 70:3134-3138, or Velazquez et al. 2020, Paenibacillus ottowii sp. nov. isolated from a fermentation system processing bovine manure, Int. J. Syst. Evol. Microbiol.; 70:1463-1469. The same is true for the genus Paenibacillus, which has formerly been classified as belonging to the genus Bacillus, see Ash et al. 1993. Molecular identification of rRNA group 3 bacilli (Ash, Farrow, Wallbanks and Collins) using a PCR probe test. Proposal for the creation of a new genus Paenibacillus. Antonie Van Leeuwenhoek. 64(3-4): 253-260.

[0100] These reclassifications of microorganisms are often based on comparisons of sequenced genomes of the microorganisms in question. Accordingly, the term Paenibacillus species strain includes also strains, which have a different genus name, but should belong to the Paenibacillus genus based on similarity of its genome to other Paenibacillus species strains. The degree of similarity between two genomes is frequently expressed in ANI-Values. More than 200 Paenibacillus genomes, including 73 Paenibacillus polymyxa genomes, have been sequenced and deposited in international databases, for example GenBank. Examples are: P. polymyxa ATCC 842, also known under the strain number DSM 36, GenBank AccNo: CP049783.1,
[0101] P. polymyxa Sb3-1 GenBank AccNo: CP010268.1,
[0102] P. polymyxa M-152 GenBank AccNo: CP034141.1,
[0103] P. polymyxa M1 GenBank AccNo: HE577054.1,
[0104] P. polymyxa SC2 GenBank AccNo: CP002213.2,
[0105] P. polymyxa SQR-21 GenBank AccNo: CP006872.1,
[0106] P. polymyxa HY96-2 GenBank AccNo: CP025957.1,
[0107] P. polymyxa YC0136 GenBank AccNo: CP017967.3,
[0108] P. polymyxa E681 GenBank AccNo: CP048794.1,
[0109] P. polymyxa CR1 GenBank AccNo: CP006941.2,
[0110] P. polymyxa J GenBank AccNo: CP015423.1,
[0111] P. polymyxa ZF197 GenBank AccNo: CP042272.1,
[0112] P. polymyxa WLY78 NCBI Reference Sequence: NZ_ALJV01000125.1,
[0113] P. ottowii strain MS2379 NCBI Reference Sequence: NZ_VIJZ00000000.1,
[0114] P. peoriae ZF390 GenBank AccNo: CP061172.1,
[0115] P. peoriae HS311 GenBank AccNo: CP011512.1,
[0116] P. kribbensis AM49 GenBank AccNo: CP020028.1,
[0117] P. kribbensis PS04 GenBank AccNo: CP041731.1,
[0118] P. terrae HPL-003 GenBank AccNo: CP003107.1,
[0119] P. sp. Aloe-11 NCBI Reference Sequence: NZ_JH601056.1,

[0120] Further Paenibacillus genomes can readily be accessed by sequencing deposited strains, like P. polymyxa LU17007 deposited as DSM 26970, which has an ANI-Value of about 98% to the genomes of P. polymyxa Sb3-1, P. polymyxa M-1, or P. polymyxa SC2 and an ANI-Value of 99% to P. polymyxa M-152.

[0121] For the purpose herein, a given Paenibacillus species strain is considered to belong to the species Paenibacillus polymyxa if it comprises an ANI-Value of at least 88% to the genome of the type strain ATCC 842. Based on this definition, Paenibacillus species strain Paenibacillus ottowii strain MS2379 is also considered to be a Paenibacillus polymyxa strain. A comparison of Paenibacillus polymyxa strain genomes via ANI-Values is provided in: Wang et al. 2020, Comparative genome analysis and mining of secondary metabolites of Paenibacillus polymyxa, Genes Genet. Syst. 95, p. 141-15G0.

[0122] A given Paenibacillus species strain is considered to belong to the species Paenibacillus peoriae, if it comprises an ANI-Value of at least 88% to the genome of P. peoriae ZF390.

[0123] A given Paenibacillus species strain is considered to belong to the species Paenibacillus kribbensis if it comprises an ANI-Value of at least 88% to the genome of P. kribbensis AM49.

[0124] A given Paenibacillus species strain is considered to belong to the species Paenibacillus terrae if it comprises an ANI-Value of at least 88% to the genome of P. terrae HPL-003.

[0125] A given Paenibacillus species strain is considered to belong to the species Paenibacillus sp. Aloe-11, if it comprises an ANI-Value of at least 88% to the genome of P. sp. Aloe-11

[0126] In case a genome has an ANI-Value of at least 88% two the genomes of two of these strains, it is considered to belong to the species to which is has the higher ANI-Value.

[0127] Preferred Paenibacillus strains have an ANI-Value of, in the order of rising preference, at least 95%, 96%, 97%, 98.0%, 98.1%, 98.2%, 98.3%, 98.4%, 98.5%, 98.6%, 98.7%, 98.8%, 98.9%, 99.0%, 99.1%, 99.2%, 99.3%, 99.4%, 99.5%, 99.6%, 99.7%, 99.8%, 99.9%, or 100.0% to the genome of P. polymyxa Sb3-1, P. polymyxa M-1, or P. polymyxa SC2 and preferably to P. polymyxa SB3-1,

[0128] In another embodiment, the Paenibacillus strains have an ANI-Value of, in the order of rising preference, at least 95%, 96%, 97%, 98.0%, 98.1%, 98.2%, 98.3%, 98.4%, 98.5%, 98.6%, 98.7%, 98.8%, 98.9%, 99.0%, 99.1%, 99.2%, 99.3%, 99.4%, 99.5%, 99.6%, 99.7%, 99.8%, 99.9%, or 100.0%. to the genome of P. polymyxa LU17007 deposited as DSM 26970.

[0129] Diaminobutyrate-2-oxoglutarate-transaminases are well known in the art. These enzymes catalyse the reaction of: L-glutamate and L-aspartate-4-semialdehyde to 2-oxoglutarate and L-2,4-diaminobutanoate. Organisms which do not comprise a functional version of these enzymes are not able to produce L-2,4-diaminobutanoate or only to a low amount. Examples for such organisms are organisms either having no coding region for an enzyme capable to perform the synthesis reaction or comprise coding regions for an enzyme with a much lower activity or stability or express such enzyme in a low amount. Preferably the organism do not comprise a coding region for such enzyme.

[0130] Examples for amino acid sequences of diaminobutyrate-2-oxoglutarate-transaminases are provided herein with the SEQ ID NO: 217, 218, 219, 220 and 221. A skilled person will readily be able to identify the sequence encoding a diaminobutyrate-2-oxoglutarate-transaminase of a given strain of interest. Table 2 shows % sequence identity values between the amino acid sequences of SEQ ID NO: 217, 218, 219, 220 and 221.

TABLE 2

| | 217_LU17007 | 218_E681 | 219_HPL-003 | 220_M1 | 221_Sb3-1 |
|---|---|---|---|---|---|
| 217_LU17007 | 100.0% | 94.5% | 93.1% | 99.3% | 99.5% |
| 218_E681 | — | 100.0% | 93.3% | 94.3% | 94.5% |
| 219 HPL-003 | — | — | 100.0% | 92.9% | 93.1% |
| 220_M1 | — | — | — | 100.0% | 99.8% |
| 221_Sb3-1 | — | — | — | — | 100.0% |

[0131] Paenibacillus strains can use the L-2,4-diaminobutanoate (DAB) produced by the diaminobutyrate-2-oxoglutarate-transaminase as building block to produce several natural compounds which show inhibitory effects to Gram-negative and/or Gram-positive bacteria. Natural compounds comprising DAB as essential building block are for example polymyxin, tridecaptin, polypeptin, paenilipoheptin, octapeptin, jolipeptin, gavaserin and saltavalin. Paenibacillus strains producing one or more of these DAB comprising compounds are usually resistant to the DAB compounds produced by them.

[0132] Paenibacillus strains which are unable to produce DAB are unable to produce these compounds, if not supplied with DAB via the growth medium.

[0133] It was observed that Paenibacillus species strains of the invention can be created by selecting a recombination event between two genetic loci in a parent strain, which comprises two loci, which are both predicted to encode non-ribosomal-peptide-synthetases (NPRS) with sequence similarity to NPRS TrdD (synonymous TriD or TrmD) of the tridecaptin gene cluster, e.g. the one disclosed in Jangra et al, 2019, Tridecaptin M, a New Variant Discovered in Mud Bacterium, Shows Activity against Colistin- and Extremely Drug-Resistant Enterobacteriaceae, Antimicrobial Agents and Chemotherapy, Volume 63, Issue 6, e00338-19.

[0134] The genomic fragment of the parent strain between these two loci comprises a locus encoding a diaminobutyrate-2-oxoglutarate-transaminase, so that a deletion event caused by a recombination between the two NPRS encoding sequences results in deletion of the locus for the diaminobutyrate-2-oxoglutarate-transaminase and the reduction of the two NPRS encoding loci to only one newly created locus with sequence similarity to a tridecaptin producing NPRS. Such recombination events may occur spontaneously e.g. by laboratory evolutions and can then be selected for, but can also be triggered by techniques known in the art, for example by mutagenesis and selection for the expected phenotype or can be constructed using targeted genetic engineering methods. Preferably, the two loci undergoing recombination show sequence similarity to the polynucleotide sequences of SEQ ID NO: 411 and 412, preferably encoding parts of the NPRS sequences of SEQ ID NOs: 409 and 410, respectively. Preferably the recombination results in a polynucleotide sequence with similarity to any one of SEQ ID Nos: 222, 223, 224, 225, 413, 414, 415, 416, 417 and 418, and preferably resulting in a frame shift or deletions in the encoded amino acid sequence in comparison to the amino acid sequence of SEQ ID NO: 1.

[0135] Preferably, the parent strain comprises an open reading frame encoding an amino acid sequence of, in the order of rising preference, at least 80%, 81%, 82%, 83%, 84%, 85%, 86%, 87%, 88%, 89%, 90%, 91%, 92%, 93%, 94%, 95%, 96%, 97%, 98%, 99%, or 100% sequence identity to SEQ ID NO: 217 and an open reading frame encoding an amino acid sequence of, in the order of rising preference, at least 80%, 81%, 82%, 83%, 84%, 85%, 86%, 87%, 88%, 89%, 90%, 91%, 92%, 93%, 94%, 95%, 96%, 97%, 98%, 99%, or 100% sequence identity to SEQ ID NO: 409, preferably encoded by a polynucleotide sequence of, in the order of rising preference, at least 80%, 81%, 82%, 83%, 84%, 85%, 86%, 87%, 88%, 89%, 90%, 91%, 92%, 93%, 94%, 95%, 96%, 97%, 98%, 99%, or 100% sequence identity to SEQ ID NO: 411, and an open reading frame encoding an amino acid sequence of, in the order of rising preference, at least 80%, 81%, 82%, 83%, 84%, 85%, 86%, 87%, 88%, 89%, 90%, 91%, 92%, 93%, 94%, 95%, 96%, 97%, 98%, 99%, or 100% sequence identity to SEQ ID NO: 410 preferably encoded by a polynucleotide sequence of, in the order of rising preference, at least 80%, 81%, 82%, 83%, 84%, 85%, 86%, 87%, 88%, 89%, 90%, 91%, 92%, 93%, 94%, 95%, 96%, 97%, 98%, 99%, or 100% sequence identity to SEQ ID NO: 412. Preferably the recombination happens between the polynucleotide comprising a polynucleotide sequence of, in the order of rising preference, at least 80%, 81%, 82%, 83%, 84%, 85%, 86%, 87%, 88%, 89%, 90%, 91%, 92%, 93%, 94%, 95%, 96%, 97%, 98%, 99%, or 100% sequence identity to SEQ ID NO: 411 and a polynucleotide comprising a polynucleotide sequence of, in the order of rising preference, at least 80%, 81%, 82%, 83%, 84%, 85%, 86%, 87%, 88%, 89%, 90%, 91%, 92%, 93%, 94%, 95%, 96%, 97%, 98%, 99%, or 100% sequence identity to SEQ ID NO: 411.

[0136] Preferable, the locus comprising a polynucleotide sequence of, in the order of rising preference, at least 80%, 81%, 82%, 83%, 84%, 85%, 86%, 87%, 88%, 89%, 90%, 91%, 92%, 93%, 94%, 95%, 96%, 97%, 98%, 99%, or 100% sequence identity to SEQ ID NO: 412 and the locus comprising a polynucleotide sequence of, in the order of rising preference, at least 80%, 81%, 82%, 83%, 84%, 85%, 86%, 87%, 88%, 89%, 90%, 91%, 92%, 93%, 94%, 95%, 96%, 97%, 98%, 99%, or 100% sequence identity to SEQ ID NO: 411 share, in the order of rising preference, at least 90%, 91%, 92%, 93%, 94%, 95%, 96%, 97%, 98%, 99%, or 100% sequence identity to each other.

[0137] Preferably, the two polynucleotides undergoing recombination encode an amino acid sequence of, in the order of rising preference, at least 80%, 81%, 82%, 83%, 84%, 85%, 86%, 87%, 88%, 89%, 90%, 91%, 92%, 93%, 94%, 95%, 96%, 97%, 98%, 99%, or 100% sequence identity to SEQ ID NO: 1.

[0138] Alternatively, the Paenibacillus strains of the invention can be created by targeted manipulation of Paenibacillus strains via recombinant techniques, e.g. using gene editing techniques like CRISPR, thereby avoiding the deletion of the whole genomic fragment between the two loci capable to undergo recombination.

[0139] Independent of its way of creation, i.e. via recombinant techniques or spontaneous or triggered recombination, the invention comprises Paenibacillus polymyxa strains not comprising a polynucleotide sequence encoding an amino acid sequence of, in the order of rising preference, at least 80%, 81%, 82%, 83%, 84%, 85%, 86%, 87%, 88%, 89%, 90%, 91%, 92%, 93%, 94%, 95%, 96%, 97%, 98%, or 99% sequence identity to SEQ ID NO: 1 and not comprising an open reading frame for a diaminobutyrate-2-oxoglutarate-transaminase comprising an amino acid sequence of, in the order of rising preference, at least 80%, 81%, 82%, 83%, 84%, 85%, 86%, 87%, 88%, 89%, 90%, 91%, 92%, 93%, 94%, 95%, 96%, 97%, 98%, 99%, or 100% sequence identity to SEQ ID NO: 217 from a parent strain comprising an open reading frame for a diaminobutyrate-2-oxoglutarate_transaminase comprising an amino acid sequence of, in the order of rising preference, at least 80%, 81%, 82%, 83%, 84%, 85%, 86%, 87%, 88%, 89%, 90%, 91%, 92%, 93%, 94%, 91%, 92%, 93%, 94%, 95%, 96%, 97%, 98%, 99%, or 100% sequence identity to SEQ ID NO: 217 and at least two loci each one comprising, in the order of rising preference, at least 80%, 81%, 82%, 83%, 84%, 85%, 86%, 87%, 88%, 89%, 90%, 91%, 92%, 93%, 94%, 95%, 96%, 97%, 98%, 99%, or 100% sequence identity to at least one of the nucleotide sequences of SEQ ID NO: 222, 223, 224, 225, 413, 414, 415, 416, 417 and 418, and wherein the two loci comprise, in the order of rising preference, at least 90%, 91%, 92%, 93%, 94%, 95%, 96%, 97%, 98%, 99%, or 100% sequence identity to each other

[0140] The parent strain has preferably an ANI-Value of, in the order of rising preference, at least 90%, 91%, 92%, 93%, 94%, 95%, 96%, 97%, 98%, 98.0%, 98.1%, 98.2%, 98.3%, 98.4%, 98.5%, 98.6%, 98.7%, 98.8%, 98.9%, 99.0%, 99.1%, 99.2%, 99.3%, 99.4%, 99.5%, 99.6%, 99.7%, 99.8%, or 99.9%, to the genome of at least one strain selected from the group comprising: P. polymyxa LU17007, P. polymyxa SQR-21, P. polymyxa M1, P. polymyxa SC2, P. polymyxa HY96-2, P. polymyxa YC0136, P. polymyxa E681, P. polymyxa CR1, P. polymyxa J, P. polymyxa ZF197, P. polymyxa WLY78, P. ottowii strain MS2379, P. peoriae ZF390, P. peoriae HS311, P. kribbensis AM49, P. kribbensis PS04, P. terrae HPL-003, P. sp. aloe-11

[0141] The parent strain has preferably an ANI-Value of, in the order of rising preference, at least 90%, 91%, 92%, 93%, 94%, 95%, 96%, 97%, 98%, 98.0%, 98.1%, 98.2%, 98.3%, 98.4%, 98.5%, 98.6%, 98.7%, 98.8%, 98.9%, 99.0%, 99.1%, 99.2%, 99.3%, 99.4%, 99.5%, 99.6%, 99.7%, 99.8%, or 99.9%, to the genome of P. polymyxa LU17007 deposited as DSM 26970.

[0142] The parent strain has preferably an ANI-Value of, in the order of rising preference, at least 90% 91%, 92%, 93%, 94%, 95%, 96%, 97%, 98%, 98.0%, 98.1%, 98.2%, 98.3%, 98.4%, 98.5%, 98.6%, 98.7%, 98.8%, 98.9%, 99.0%, 99.1%, 99.2%, 99.3%, 99.4%, 99.5%, 99.6%, 99.7%, 99.8%, or 99.9%, to the genome of P. polymyxa SQR-21.

[0143] The parent strain has preferably an ANI-Value of, in the order of rising preference, at least 90% 91%, 92%, 93%, 94%, 95%, 96%, 97%, 98%, 98.0%, 98.1%, 98.2%, 98.3%, 98.4%, 98.5%, 98.6%, 98.7%, 98.8%, 98.9%, 99.0%, 99.1%, 99.2%, 99.3%, 99.4%, 99.5%, 99.6%, 99.7%, 99.8%, or 99.9%, to the genome of P. polymyxa M-1.

[0144] The parent strain has preferably an ANI-Value of, in the order of rising preference, at least 90% 91%, 92%, 93%, 94%, 95%, 96%, 97%, 98%, 98.0%, 98.1%, 98.2%, 98.3%, 98.4%, 98.5%, 98.6%, 98.7%, 98.8%, 98.9%, 99.0%, 99.1%, 99.2%, 99.3%, 99.4%, 99.5%, 99.6%, 99.7%, 99.8%, or 99.9%, to the genome of P. polymyxa SC2.

[0145] The parent strain has preferably an ANI-Value of, in the order of rising preference, at least 90% 91%, 92%, 93%, 94%, 95%, 96%, 97%, 98%, 98.0%, 98.1%, 98.2%, 98.3%, 98.4%, 98.5%, 98.6%, 98.7%, 98.8%, 98.9%, 99.0%, 99.1%, 99.2%, 99.3%, 99.4%, 99.5%, 99.6%, 99.7%, 99.8%, or 99.9%, to the genome of P. polymyxa HY96-2.

[0146] The parent strain has preferably an ANI-Value of, in the order of rising preference, at least 90% 91%, 92%, 93%, 94%, 95%, 96%, 97%, 98%, 98.0%, 98.1%, 98.2%, 98.3%, 98.4%, 98.5%, 98.6%, 98.7%, 98.8%, 98.9%, 99.0%, 99.1%, 99.2%, 99.3%, 99.4%, 99.5%, 99.6%, 99.7%, 99.8%, or 99.9%, to the genome of P. polymyxa YC0136.

[0147] The parent strain has preferably an ANI-Value of, in the order of rising preference, at least 90% 91%, 92%, 93%, 94%, 95%, 96%, 97%, 98%, 98.0%, 98.1%, 98.2%, 98.3%, 98.4%, 98.5%, 98.6%, 98.7%, 98.8%, 98.9%, 99.0%, 99.1%, 99.2%, 99.3%, 99.4%, 99.5%, 99.6%, 99.7%, 99.8%, or 99.9%, to the genome of P. polymyxa E681.

[0148] The parent strain has preferably an ANI-Value of, in the order of rising preference, at least 90% 91%, 92%, 93%, 94%, 95%, 96%, 97%, 98%, 98.0%, 98.1%, 98.2%, 98.3%, 98.4%, 98.5%, 98.6%, 98.7%, 98.8%, 98.9%, 99.0%, 99.1%, 99.2%, 99.3%, 99.4%, 99.5%, 99.6%, 99.7%, 99.8%, or 99.9%, to the genome of P. polymyxa CR1.

[0149] The parent strain has preferably an ANI-Value of, in the order of rising preference, at least 90% 91%, 92%, 93%, 94%, 95%, 96%, 97%, 98%, 98.0%, 98.1%, 98.2%, 98.3%, 98.4%, 98.5%, 98.6%, 98.7%, 98.8%, 98.9%, 99.0%, 99.1%, 99.2%, 99.3%, 99.4%, 99.5%, 99.6%, 99.7%, 99.8%, or 99.9%, to the genome of P. polymyxa J.

[0150] The parent strain has preferably an ANI-Value of, in the order of rising preference, at least 90% 91%, 92%, 93%, 94%, 95%, 96%, 97%, 98%, 98.0%, 98.1%, 98.2%, 98.3%, 98.4%, 98.5%, 98.6%, 98.7%, 98.8%, 98.9%, 99.0%, 99.1%, 99.2%, 99.3%, 99.4%, 99.5%, 99.6%, 99.7%, 99.8%, or 99.9%, to the genome of P. polymyxa ZF197.

[0151] The parent strain has preferably an ANI-Value of, in the order of rising preference, at least 90% 91%, 92%, 93%, 94%, 95%, 96%, 97%, 98%, 98.0%, 98.1%, 98.2%, 98.3%, 98.4%, 98.5%, 98.6%, 98.7%, 98.8%, 98.9%, 99.0%, 99.1%, 99.2%, 99.3%, 99.4%, 99.5%, 99.6%, 99.7%, 99.8%, or 99.9%, to the genome of P. polymyxa WLY78.

[0152] The parent strain has preferably an ANI-Value of, in the order of rising preference, at least 90% 91%, 92%, 93%, 94%, 95%, 96%, 97%, 98%, 98.0%, 98.1%, 98.2%, 98.3%, 98.4%, 98.5%, 98.6%, 98.7%, 98.8%, 98.9%, 99.0%, 99.1%, 99.2%, 99.3%, 99.4%, 99.5%, 99.6%, 99.7%, 99.8%, or 99.9%, to the genome of P. ottowii strain MS2379.

[0153] The parent strain has preferably an ANI-Value of, in the order of rising preference, at least 90% 91%, 92%, 93%, 94%, 95%, 96%, 97%, 98%, 98.0%, 98.1%, 98.2%, 98.3%, 98.4%, 98.5%, 98.6%, 98.7%, 98.8%, 98.9%, 99.0%, 99.1%, 99.2%, 99.3%, 99.4%, 99.5%, 99.6%, 99.7%, 99.8%, or 99.9%, to the genome of P. peoriae ZF390.

[0154] The parent strain has preferably an ANI-Value of, in the order of rising preference, at least 90% 91%, 92%, 93%, 94%, 95%, 96%, 97%, 98%, 98.0%, 98.1%, 98.2%, 98.3%, 98.4%, 98.5%, 98.6%, 98.7%, 98.8%, 98.9%, 99.0%, 99.1%, 99.2%, 99.3%, 99.4%, 99.5%, 99.6%, 99.7%, 99.8%, or 99.9%, to the genome of P. peoriae HS311.

[0155] The parent strain has preferably an ANI-Value of, in the order of rising preference, at least 90% 91%, 92%, 93%, 94%, 95%, 96%, 97%, 98%, 98.0%, 98.1%, 98.2%, 98.3%, 98.4%, 98.5%, 98.6%, 98.7%, 98.8%, 98.9%, 99.0%, 99.1%, 99.2%, 99.3%, 99.4%, 99.5%, 99.6%, 99.7%, 99.8%, or 99.9%, to the genome of P. kribbensis AM49.

[0156] The parent strain has preferably an ANI-Value of, in the order of rising preference, at least 90% 91%, 92%, 93%, 94%, 95%, 96%, 97%, 98%, 98.0%, 98.1%, 98.2%, 98.3%, 98.4%, 98.5%, 98.6%, 98.7%, 98.8%, 98.9%, 99.0%, 99.1%, 99.2%, 99.3%, 99.4%, 99.5%, 99.6%, 99.7%, 99.8%, or 99.9%, to the genome of P. kribbensis PS04.

[0157] The parent strain has preferably an ANI-Value of, in the order of rising preference, at least 90% 91%, 92%, 93%, 94%, 95%, 96%, 97%, 98%, 98.0%, 98.1%, 98.2%, 98.3%, 98.4%, 98.5%, 98.6%, 98.7%, 98.8%, 98.9%, 99.0%, 99.1%, 99.2%, 99.3%, 99.4%, 99.5%, 99.6%, 99.7%, 99.8%, or 99.9%, to the genome of P. terrae HPL-003.

[0158] The parent strain has preferably an ANI-Value of, in the order of rising preference, at least 90% 91%, 92%, 93%, 94%, 95%, 96%, 97%, 98%, 98.0%, 98.1%, 98.2%, 98.3%, 98.4%, 98.5%, 98.6%, 98.7%, 98.8%, 98.9%, 99.0%, 99.1%, 99.2%, 99.3%, 99.4%, 99.5%, 99.6%, 99.7%, 99.8%, or 99.9%, to the genome of P. sp. Aloe-11.

[0159] The parent strain has preferably an ANI-Value of, in the order of rising preference, at least 98.0%, 98.1%, 98.2%, 98.3%, 98.4%, 98.5%, 98.6%, 98.7%, 98.8%, 98.9%, 99.0%, 99.1%, 99.2%, 99.3%, 99.4%, 99.5%, 99.6%, 99.7%, 99.8%, or 99.9%, to the genome of P. polymyxa LU17007 deposited as DSM 26970.

[0160] The parent strain has preferably an ANI-Value of, in the order of rising preference, at least 98.0%, 98.1%, 98.2%, 98.3%, 98.4%, 98.5%, 98.6%, 98.7%, 98.8%, 98.9%, 99.0%, 99.1%, 99.2%, 99.3%, 99.4%, 99.5%, 99.6%, 99.7%, 99.8%, or 99.9%, to the genome of P. polymyxa SQR-21.

[0161] In case the Paenibacillus strains of the invention are created via recombination, the deleted genome fragment of the parent strain can be of considerable size.

[0162] In the case that the parent strain is Paenibacillus polymyxa strain LU17007 deposited as DSM 26970 or Paenibacillus polymyxa strain SB3-1 or similar strains having an ANI-Value of, in the order of rising preference, at least 90%, 91%, 92%, 93%, 94%, 95%, 96%, 97%, 98%, 98.0%, 98.1%, 98.2%, 98.3%, 98.4%, 98.5%, 98.6%, 98.7%, 98.8%, 98.9%, 99.0%, 99.1%, 99.2%, 99.3%, 99.4%, 99.5%, 99.6%, 99.7%, 99.8%, or 99.9%, to the genome of Paenibacillus polymyxa strain LU17007 deposited as DSM 26970 or Paenibacillus polymyxa strain SB3-1, the genomic fragment lost due to the recombination event comprises a plurality, preferably at least 147, of coding regions, which encode polypeptides which have, in the order of rising preference, at least 90%, 91%, 92%, 93%, 94%, 95%, 96%, 97%, 98%, 99%, or 100% sequence identity
[0163] a) to the amino acid sequences of SEQ ID NOs: 2, 3, 5, 7, 8, 9, 10, 11, 12, 13, 14, 15, 16, 17, 18, 19, 20, 21, 22, 23, 25, 27, 28, 30, 31, 32, 34, 36, 37, 38, 39, 40, 41, 44, 45, 47, 48, 50, 51, 52, 53, 54, 55, 58, 60, 61, 62, 63, 64, 65, 66, 67, 68, 69, 70, 72, 77, 78, 79, 80, 81, 82, 83, 84, 86, 87, 89, 91, 92, 93, 94, 95, 96, 97, 98, 100, 101, 102, 103, 104, 105, 107, 108, 109, 110, 111, 112, 113, 114, 115, 116, 117, 118, 119, 120, 122, 124, 125, 126, 127, 128, 129, 130, 132, 133, 134, 135, 136, 137, 138, 139, 140, 141, 142, 143, 144, 145, 146, 147, 148, 149, 150, 151, 152, 153, 154, 155, 156, 157, 158, 159, 161, 162, 163, 164, 165, 166, 167, 169, 170, 174, 175, 176, 177, 178, 180, 181, or
[0164] b) to the amino acid sequences of SEQ ID NOs: 241, 242, 244, 245, 246, 247, 248, 249, 250, 251, 252, 253, 254, 255, 256, 257, 258, 259, 260, 261, 262, 263, 264, 265, 266, 267, 268, 269, 270, 271, 272, 273, 274, 275, 276, 277, 278, 279, 280, 281, 282, 283, 284, 285, 286, 287, 288, 289, 290, 291, 292, 293, 294, 295, 296, 297, 298, 299, 300, 301, 302, 303, 304, 305, 306, 307, 309, 310, 311, 312, 313, 314, 315, 316, 317, 318, 319, 320, 321, 322, 323, 324, 325, 326, 327, 328, 329, 330, 331, 332, 333, 347, 348, 349, 350, 351, 352, 353, 354, 355, 356, 357, 358, 360, 363, 363, 364, 365, 366, 367, 369, 370, 371, 372, 373, 374, 375, 376, 377, 378, 379, 380, 381, 382, 383, 384, 385, 387, 388, 389, 390, 391, 392, 393, 394, 395, 396, 397, 398, 399, 400, 401, 402, 403, 404, 405, 406, 407.

[0165] Preferably the genomic fragment lost due to the recombination event comprises at least one coding sequence of, in the order of rising preference, at least 90%, 91%, 92%, 93%, 94%, 95%, 96%, 97%, 98%, 99%, or 100% sequence identity for each one of the amino acid sequences listed above under a) or b), respectively.

TABLE 3
Polypeptides encoded on the genomic fragment of Paenibacillus polymyxa strain LU17007 deposited as DSM 26970 and Paenibacillus polymyxa
strain SB3-1, respectively. The table lists the predicted function of the encoded polypeptides, the SEQ ID NOs comprising the respective
amino acid sequences and the percent sequence identities between similar polypeptides encoded in the genome fragments.

| | predicted | | predicted | % seq. |
|---|---|---|---|---|
| SEQ ID | protein function | SEQ ID | protein function | ident. |
| 2 | bacitracin_synthetase_3 | 407 | non-ribosomal_peptide_synthetase | 99.6 |
| 3 | protein_flp | 406 | serine_hydrolase | 99.1 |
| 5 | endonuclease_yhcR | 405 | endonuclease | 98.5 |
| 7 | hypothetical_protein_22823_23171 | 404 | hypothetical_protein | 100.0 |
| 8 | transcription_elongation_factor_greA | 403 | transcription_elongation_factor_GreA | 100.0 |
| 9 | putative_protein_yrxA | 402 | transcription_repressor_NadR | 100.0 |
| 10 | aminotransferase_class_V | 401 | IscS_subfamily_cysteine_desulfurase | 99.2 |
| 11 | quinolinate_synthetase_A | 400 | quinolinate_synthase_NadA | 98.6 |
| 12 | hypothetical_protein | 399 | hypothetical_protein | 99.1 |
| 13 | inner_membrane_protein_oxaA | 398 | membrane_protein_insertase_YidC | 99.6 |
| 14 | GCN5-related_N-acetyltransferase | 397 | GCN5_family_acetyltransferase | 99.6 |
| 15 | lipid_phosphate_phosphohydrolase | 396 | phosphatase_PAP2_family_protein | 99.6 |
| 16 | putative_protein_ywoA | 395 | undecaprenyl-diphosphatase | 97.2 |
| 17 | putative_transcriptional_regulatory_protein_ykoG | 394 | response_regulator_transcription_factor | 99.2 |
| 18 | two-component_sensor_histidine_kinase | 393 | HAMP_domain-containing_histidine_kinase | 99.3 |
| 19 | putative_protein_ydhO_Flags_Precursor | 392 | C40_family_peptidase | 99.4 |
| 20 | glycosyl_transferase_group | 391 | glycosyltransferase_family_4_protein | 99.7 |
| 21 | Succinylglutamate_{—} | 390 | succinylglutamate_desuccinylase_{—} | 95.4 |
| | desuccinylase | | aspartoacylase_family | |
| 22 | mannose-1-phosphate_{—} | 389 | mannose-1-phosphate_{—} | 98.7 |
| | guanylyltransferase | | guanylyltransferase | |
| 23 | hypothetical_protein | 388 | hypothetical_protein | 100.0 |
| 25 | endospore_coat-associated_protein_yheC | 387 | YheC_YheD_family_protein | 96.4 |
| 27 | ATP-binding_protein | 385 | ABC_transporter_ATP-binding_protein | 99.6 |
| 28 | putative_transporter | 384 | AEC_family_transporter | 99.0 |
| 30 | hypothetical_protein | 383 | rhodanese-related_sulfurtransferase | 99.0 |
| 31 | glycosyl_hydrolase_family_27 | 382 | glycoside_hydrolase_family_27_protein | 99.3 |
| 32 | PfkB_family_carbohydrate_kinase | 38- | carbohydrate_kinase_family_protein | 98.6 |
| 34 | topology_modulation_protein | 380 | adenylate_kinase | 100.0 |
| 36 | prolyl-tRNA_synthetase | 379 | proline--tRNA_ligase | 99.3 |
| 37 | spermidine_synthase_1 | 378 | fused_MFS_spermidine_synthase | 100.0 |
| 38 | hypothetical_protein | 377 | YebC_PmpR_family_DNA- | 100.0 |
| | | | binding_transcriptional_regulator | |
| 39 | HTH-type_transcriptional_{—} | 376 | TetR_AcrR_family_{—} | 100.0 |
| | repressor_dhaR | | transcriptional_regulator | |
| 40 | phenazine_biosynthesis_{—} | 375 | nuclear_transport_{—} | 100.0 |
| | protein_phzB | | factor_2_family_protein | |
| 41 | prestalk_A_{—} | 374 | NmrA_family_{—} | 99.7 |
| | differentiation_protein_A | | NAD-binding_protein | |
| 44 | putative_protein | 372 | Cys-tRNA_deacylase | 98.7 |
| 45 | 50S_ribosomal_protein_L7_L12 | 371 | ribosomal_protein_L7_L12 | 96.4 |
| 47 | xylose_repressor | 370 | ROK_family_protein | 100.0 |
| 48 | 6-phospho-beta-glucosidase | 369 | glycoside_hydrolase_family_1_protein | 99.8 |
| 50 | phosphodiesterase_yfcE | 367 | phosphodiesterase | 99.5 |
| 51 | Agmatine_deiminase | 366 | agmatine_deiminase_family_protein | 99.1 |
| 52 | putative_carbon-nitrogen_hydrolase | 365 | N-carbamoylputrescine_amidase | 99.7 |
| 53 | hypothetical_protein | 364 | hypothetical_protein | 94.3 |
| 54 | NADH_flavin_oxidoreductase | 363 | FAD-dependent_oxidoreductase | 100.0 |
| 55 | NADH_flavin_oxidoreductase | 363 | FAD-dependent_oxidoreductase | 99.2 |
| 58 | hypothetical_protein | 360 | immunity_63_family_protein | 98.0 |
| 60 | ferrichrome_transport_system_permease_protein_fhuB | 358 | iron_ABC_transporter_permease | 98.8 |
| 61 | Vitamin_B12_import_system_permease_protein_btuC | 357 | iron_ABC_transporter_permease | 99.7 |
| 62 | NAD | 356 | NADH_oxidoreductase | 97.9 |
| 63 | putative_HTH-type_{—} | 355 | helix-turn-helix_{—} | 100.0 |
| | transcriptional_regulator_ytcD | | transcriptional_regulator | |
| 64 | protein_PhnB | 354 | VOC_family_protein | 100.0 |
| 65 | hypothetical_protein | 353 | DUF3934_family_protein | 98.4 |
| 66 | pseudouridylate_synthase | 352 | pseudouridine_synthase | 99.6 |
| 67 | spore_germination_protein_A2 | 351 | endospore_germination_permease | 100.0 |
| 68 | hypothetical_protein | 350 | hypothetical_protein | 100.0 |
| 69 | spore_germination_protein_KC_Flags_Precursor | 349 | GerC_family_spore_germination_protein | 99.8 |
| 70 | spore_germination_protein_KA | 348 | spore_germination_protein | 99.6 |
| 72 | hydrolase_alpha_beta_fold_family | 347 | alpha_beta_hydrolase | 98.9 |
| 77 | hydroxyacylglutathione_hydrolase | 333 | MBL_fold_metallo-hydrolase | 90.5 |
| 78 | hypothetical_protein | 332 | hypothetical_protein | 97.1 |
| 79 | ATP-dependent_Clp_protease_{—} | 331 | ATP-dependent_Clp_endopeptidase_{—} | 99.5 |
| | proteolytic_subunit | | proteolytic_subunit_ClpP | |
| 80 | RNA_polymerase_sigma_factor | 330 | RNA_polymerase_sigma_factor | 98.8 |
| 81 | alpha_beta_hydrolase | 329 | alpha_beta_fold_hydrolase | 99.2 |
| 82 | hypothetical_protein | 328 | DUF4303_domain-containing_protein | 97.7 |
| 83 | methionine_aminopeptidase | 327 | type_I_methionyl_aminopeptidase | 99.6 |
| 84 | hypothetical_protein | 326 | TetR_family_transcriptional_regulator | 93.5 |
| 86 | putative_protein_yraL | 325 | hypothetical_protein | 87.5 |
| 87 | lipase 87271_88288 | 324 | alpha_beta_hydrolase | 98.8 |
| 89 | hypothetical_protein | 323 | thioredoxin_domain-containing_protein | 99.5 |
| 91 | methyl-accepting_chemotaxis_protein_mcpA_H1 | 322 | methyl-accepting_chemotaxis_protein | 99.2 |
| 92 | cheY-like_receiver | 321 | hybrid_sensor_histidine_{—} | 97.9 |
| | | | kinase_response_regulator | |
| 93 | sensory_transduction_protein_regX3 | 320 | response_regulator_transcription_factor | 100.0 |
| 94 | diaminobutyrate-2- | 319 | diaminobutyrate--2- | 99.5 |
| | oxoglutarate_transaminase | | oxoglutarate_transaminase | |
| 95 | NAD | 318 | NADH-dependent_oxidoreductase | 99.4 |
| 96 | putative_membrane_protein | 317 | GGDEF_domain-containing_protein | 99.5 |
| 97 | cyclic_beta_1-2_glucan_synthetase | 316 | glycosyl_transferase | 99.4 |
| 98 | thioesterase | 315 | thioesterase | 99.2 |
| 100 | inosose_dehydratase | 314 | sugar_phosphate_isomerase_epimerase | 99.1 |
| 101 | hypothetical_protein | 313 | DUF423_domain-containing_protein | 100.0 |
| 102 | putative_cellulose_14-beta-cellobiosidase | 312 | cellulose_14-beta-cellobiosidase | 99.6 |
| 103 | ferritin_heavy_subunit | 311 | ferritin | 100.0 |
| 104 | putative_N-acetyltransferase_ytml | 310 | GNAT_family_N-acetyltransferase | 100.0 |
| 105 | acylaminoacyl-peptidase | 309 | S9_family_peptidase | 99.7 |
| 107 | acetate-CoA_ligase | 307 | acyl--CoA_ligase | 98.7 |
| 108 | aminopeptidase_AmpS | 306 | aminopeptidase | 99.3 |
| 109 | HTH-type_transcriptional_regulator_Betl | 305 | TetR_AcrR_family_transcriptional_regulator | 98.5 |
| 110 | hypothetical_protein | 304 | HXXEE_domain-containing_protein | 98.1 |
| 111 | hypothetical_protein | 303 | DUF4309_domain-containing_protein | 91.7 |
| 112 | HTH-type_transcriptional_regulator_betl | 302 | TetR_AcrR_family_transcriptional_regulator | 99.4 |
| 113 | hypothetical_protein | 301 | sulfurtransferase_TusA_family_protein | 97.4 |
| 114 | putative_protein_yrkE | 300 | DsrE_DsrF_DrsH-like_family_protein | 98.1 |
| 115 | copper-sensing_transcriptional_repressor_csoR | 299 | metal-sensitive_transcriptional_regulator | 100.0 |
| 116 | hypothetical_protein | 298 | DUF421_domain-containing_protein | 99.6 |
| 117 | spore_germination_protein_yndE | 297 | GerAB_ArcD_ProY_family_transporter | 100.0 |
| 118 | spore_germination_protein_KC_Flags_Precursor | 296 | GerC_family_spore_germination_protein | 100.0 |
| 119 | spore_germination_protein_KA | 295 | spore_germination_protein | 99.8 |
| 120 | cystathionine_beta-lyase | 294 | aminotransferase_class_I_II-fold | 99.0 |
| 122 | proline_iminopeptidase | 293 | alpha_beta_hydrolase | 98.0 |
| 124 | hydrolase_haloacid_{—} | 292 | YjjG_family_noncanonical_{—} | 98.8 |
| | dehalogenase_like_family | | pyrimidine_nucleotidase | |
| 125 | alpha-galactosidase | 291 | alpha-galactosidase | 98.9 |
| 126 | HTH-type_{—} | 290 | substrate-binding_{—} | 99.4 |
| | transcriptional_repressor | | domain-containing_protein | |
| 127 | two-component_sensor_kinase_YesM | 289 | histidine_kinase | 98.7 |
| 128 | putative_transcriptional_{—} | 288 | response_regulator | 97.3 |
| | regulatory_protein_yesN | | | |
| 129 | ABC_transporter_extracellular- | 287 | extracellular_solute- | 97.7 |
| | binding_protein_yurO_Flags | | binding_protein | |
| 130 | sn-glycerol-3-phosphate_{—} | 286 | sugar_ABC_{—} | 98.9 |
| | transport_system_permease_protein_ugpA | | transporter_permease | |
| 132 | sn-glycerol-3-phosphate_{—} | 285 | carbohydrate_ABC_{—} | 100.0 |
| | transport_system_permease_protein_ugpE | | transporter_permease | |
| 133 | alpha-amylase | 284 | DUF3459_domain-containing_protein | 98.3 |
| 134 | inositol_2-dehydrogenase_D- | 283 | Gfo_Idh_MocA_{—} | 99.4 |
| | chiroinositol_3-dehydrogenase | | family_oxidore-ductase | |
| 135 | putative_protein_YvdQ | 282 | DUF3231_family_protein | 100.0 |
| 136 | hypothetical_protein | 281 | WGxxGxxG-CTERM_domain-containing_protein | 100.0 |
| 137 | marR_family_transcriptional_regulator | 280 | MarR_family_transcriptional_regulator | 98.6 |
| 138 | NADH_flavin_oxidoreductase_NADH_oxidase | 279 | NADH_flavin_oxidoreductase_NADH_oxidase | 100.0 |
| 139 | araC_family_transcriptional_regulator | 278 | AraC_family_transcriptional_regulator | 98.6 |
| 140 | reductase | 277 | SDR_family_oxidoreductase | 98.9 |
| 141 | putative_MFS-type_transporter_ywoD | 276 | MFS_transporter | 99.8 |
| 142 | hydrogen_peroxide-inducible_gene_activator | 275 | LysR_family_transcriptional_regulator | 99.7 |
| 143 | tetracycline_resistance_protein | 274 | tetracycline_resistance_MFS_efflux_pump | 99.3 |
| 144 | Lacl_family_transcriptional_regulator | 273 | Lacl_family_DNA-binding_transcriptional_regulator | 99.7 |
| 145 | cellulase | 272 | glycoside_hydrolase_family_5_protein | 99.6 |
| 146 | aldo-keto_reductase_family_1_member_C1 | 27 | aldo_keto_reductase | 98.3 |
| 147 | Msm_operon_regulatory_protein | 270 | AraC_family_transcriptional_regulator | 97.6 |
| 148 | putative_tRNA-dihydrouridine_synthase | 269 | xenobiotic_reductase_b | 92.6 |
| 149 | putative_HTH-type_transcriptional_regulatorYisV | 268 | PLP-dependent_aminotransferase_family_protein | 98.6 |
| 150 | D-alanine-D-alanine_ligase | 267 | D-alanine--D-alanine_ligase | 100.0 |
| 151 | putative_streptothricin_acetyltransferase | 266 | GNAT_family_N-acetyltransferase | 98.4 |
| 152 | hypothetical_protein | 265 | DUF1349_domain-containing_protein | 100.0 |
| 153 | phosphoglycolate_phosphatase | 264 | HAD_family_phosphatase | 99.2 |
| 154 | alcohol_dehydrogenase_{—} | 263 | 2-amino-2-deoxy-D- | 98.0 |
| | zinc-containing | | mannitol_dehydrogenase_GutB1 | |
| 155 | 4-aminobutyrate_aminotransferase | 262 | aspartate_aminotransferase_family_protein | 98.8 |
| 156 | sodium-dependent_glucose_transporter_1 | 261 | MFS_transporter | 99.0 |
| 157 | fructuronate_reductase | 260 | mannitol_dehydrogenase_family_protein | 100.0 |
| 158 | mannonate_dehydratase | 259 | mannonate_dehydratase | 99.7 |
| 159 | putative_HTH-type_transcriptional_regulator_YdfH | 258 | GntR_family_transcriptional_regulator | 99.5 |
| 161 | D-mannonate_oxidoreductase | 257 | SDR_family_oxidoreductase | 99.3 |
| 162 | HTH-type_transcriptional_activator_rhaR | 256 | AraC_family_transcriptional_regulator | 98.9 |
| 163 | hypothetical_protein | 255 | glycosyl_hydrolase_115_family_protein | 99.0 |
| 164 | dihydrodipicolinate_synthase | 254 | dihydrodipicolinate_synthase_family_protein | 98.3 |
| 165 | putative_protein_yyaS | 253 | YitT_family protein | 99.1 |
| 166 | transcriptional_{—} | 252 | winged_helix-turn-helix_{—} | 98.7 |
| | regulator_slyA | | transcriptional_regulator | |
| 167 | putative_N-acetyltransferase | 251 | GNAT_family_N-acetyltransferase | 99.4 |
| 169 | amidase | 250 | amidase | 98.9 |
| 170 | hypothetical_protein | 249 | hypothetical_protein | 91.2 |
| 174 | deoxycytidine_triphosphate_{—} | 248 | deoxycytidine_{—} | 97.1 |
| | deaminase_dCTP_deaminase | | triphosphate_deaminase | |
| 175 | 30S_ribosomal_protein_S14 | 247 | 30S_ribosomal_protein_S14 | 98.9 |
| 176 | putative_GTP-binding_protein_yjiA | 246 | GTP-binding_protein | 97.9 |
| 177 | putative_cyclohydrolase | 245 | GTP_cyclohydrolase_I_FolE2 | 98.5 |
| 178 | putative_HTH-type_{—} | 244 | winged_helix-turn-helix_{—} | 100.0 |
| | transcriptional_regulator_YdgJ | | transcriptional_regulator | |
| 180 | lipid_A_export_ATP- | 242 | ABC_transporter_{—} | 98.5 |
| | binding_permease_protein_MsbA | | ATP-binding_protein | |
| 181 | lipid_A_export_ATP- | 241 | ABC_transporter_{—} | 98.2 |
| | binding_permease_protein_MsbA | | ATP-binding_protein | |

[0166] If the parent strain is Paenibacillus polymyxa strain LU17007 deposited as DSM 26970 or a similar strain having an ANI-Value of, in the order of rising preference, at least 90%, 91%, 92%, 93%, 94%, 95%, 96%, 97%, 98%, 98.0%, 98.1%, 98.2%, 98.3%, 98.4%, 98.5%, 98.6%, 98.7%, 98.8%, 98.9%, 99.0%, 99.1%, 99.2%, 99.3%, 99.4%, 99.5%, 99.6%, 99.7%, 99.8%, or 99.9%, to the genome of Paenibacillus polymyxa strain LU17007 deposited as DSM 26970, the deleted fragment may further comprise one or more open reading frames, which encode polypeptides which have in the order of rising preference, at least 90%, 91%, 92%, 93%, 94%, 95%, 96%, 97%, 98%, 99%, or 100% sequence identity to the amino acid sequences of one or more of SEQ ID Nos: 182, 183, 184, 185, 186, 187, 188, 189, 190, 191, 192, 193, 194, 195, 196, 197, 198, 199, 200, 201, 202, 203, 204, 205, 206, 207, 208, 209, 210, 211, 212, 213, 214, 215. If the parent strain is Paenibacillus polymyxa strain S1B3-1 or similar strains having an ANI-Value of, in the order of rising preference, at least 90%, 91%, 92%, 93%, 94%, 95%, 96%, 97%, 98%, 98.0%, 98.1%, 98.2%, 98.3%, 98.4%, 98.5%, 98.6%, 98.7%, 98.8%, 98.9%, 99.0%, 99.1%, 99.2%, 99.3%, 99.4%, 99.5%, 99.6%, 99.7%, 99.8%, or 99.9%, to the genome of Paenibacillus polymyxa strain S1B3-1, the deleted fragment may further comprise one or more open reading frames, which encode polypeptides which have in the order of rising preference, at least 90%, 91%, 92%, 93%, 94%, 95%, 96%, 97%, 98%, 99%, or 100% sequence identity to one or more of the amino acid sequences of SEQ ID NOs: 334, 335, 336, 337, 338, 339, 340, 341, 342, 343, 344, 345, 346.

[0167] In one embodiment the Paenibacillus polymyxa strain is derived from the parent strain P. polymyxa LU17007 deposited as DSM 26970, and is preferably one of the strains of the group consisting of LU20754 deposited as DSM 33970, LU21132 deposited as DSM 33971, LU21514 deposited as DSM 33972, LU21552 deposited as DSM 33973, LU22377 deposited as DSM 33974, LU22378 deposited as DSM 33975, LU22379 deposited as DSM 33976, and LU22381 deposited as DSM 33977.

[0168] Paenibacillus strains usually have the capacity to produce several different compounds which have the capacity to inhibit the growth of other Gram-positive or Gram-negative bacteria or which even inhibit Gram-positive and Gram-negative bacteria. These compounds include compounds of several classes including DAB comprising compounds, like polymyxins, tridecaptins, polypeptins, paenilipoheptins, octapeptins, jolipeptin, gavaserin or saltavalin, but also ribosomally synthesized and post-translationally modified peptides (RiPPs), like lanthionine or methyllanthionine-containing lanthipeptides, see Baindara et al., 2019, Whole genome mining reveals a diverse repertoire of lanthionine synthetases and lanthipeptides among the genus Paenibacillus, Journal of Applied Microbiology 128, 473-490,

[0169] Paenibacillus species strains lacking a functional diaminobutyrate-2-oxoglutarate-transaminase are unable to produce diaminobutyrate-2-oxoglutarate-transaminase and are unable to produce DAB comprising compounds, even, if they comprise functional gene clusters for the respective DAB comprising compound in their genomes. Based on this, they lack the detrimental effects on other Gram-positive and Gram-negative bacteria provided by the DAB comprising compounds produced under normal circumstances but remain resistant to the DAB comprising compounds they used to produce before they lost the capacity to produce a functional diaminobutyrate-2-oxoglutarate-transaminase.

[0170] This makes these Paenibacillus species strains especially suited to be used in mixtures with other bacteria, which would normally suffer from the production of DAB comprising compounds.

[0171] Accordingly, one embodiment of the invention comprises a mixture comprising a) a pure culture of a Paenibacillus species strain which does not produce DAB comprising compounds and b) a pure culture of a microorganism which is sensitive to at least one DAB comprising compound. A microorganism of b) is sensitive to a DAB comprising compound, if its growth is reduced in presence of the respective DAB comprising compound in question.

[0172] Reduced growth of a microorganism of b) can be tested via a plate assay similar to the one used in the inhibition assay described in Example 5. The plate assay comprises preferably a Paenibacillus species strain producing DAB comprising compounds, e.g. polymyxin or tridecaption or producing polymyxin and tridecaptin, which is preferably the parent strain to the Paenibacillus species strain of a) or a Paenibacillus species strain having an ANI-Value of, in the order of rising preference, at least 98.0%, 98.1%, 98.2%, 98.3%, 98.4%, 98.5%, 98.6%, 98.7%, 98.8%, 98.9%, 99.0%, 99.1%, 99.2%, 99.3%, 99.4%, 99.5%, 99.6%, 99.7%, 99.8%, or 99.9% to the Paenibacillus species strain of a). A further method is to compare the growth rate of the microorganism of b) in a liquid culture comprising at least one DAB comprising compound with the growth rate of the microorganism of b) in a liquid culture not comprising the respective DAB comprising compound grown under the same conditions.

[0173] Preferably the Paenibacillus species strain of a) does not produce polymyxins or tridecaptins or does not produce polymyxins or tridecaptins and the microorganism of b) is sensitive to at least one polymyxin or at least one tridecaptin or to at least one polymyxin and at least one tridecaptin. Preferably, the Paenibacillus species strain of a) does not produce colistin or tridecaptin M or does not produce both of them, and the microorganism of b) is sensitive to colistin or to tridecaptin M or is sensitive to both of them.

[0174] The phrase “does not produce” means that the respective Paenibacillus species strain produces less than, in rising order of preference, 0.5, 0,3, 0,2, 0.1 mg/ml, even more preferred less than, in rising order of preference, 8 μg/ml, 6 μg/ml, 4 μg/ml, 2 μg/ml of colistin or tridecaptin M or both, or more preferred of any polymyxin or any tridecaptin or any polymyxin or tridecaptin or even more preferred of any DAB comprising compound. The production level is preferably measured after a growth of the Paenibacillus species strain in a soy based culture broth or similar culture broths based on yeast extract, casein or peptone, preferably it is a soy based medium, for at least 48 hours, preferably reaching a sporulation rate higher than 80%. The growth temperature is preferably between 28° C. to 37° C., more preferred 30° C. to 35° C. and even more preferred between 32° C. and 34° C. The pH-value of the culture broth is preferably between pH 6 and pH 7.

[0175] Preferably, the microorganism of b) is not sensitive to the presence of the Paenibacillus species strain of a), but is sensitive to the presence of a Paenibacillus species strain having an ANI-Value of, in the order of rising preference, at least 98.0%, 98.1%, 98.2%, 98.3%, 98.4%, 98.5%, 98.6%, 98.7%, 98.8%, 98.9%, 99.0%, 99.1%, 99.2%, 99.3%, 99.4%, 99.5%, 99.6%, 99.7%, 99.8%, or 99.9% to the Paenibacillus species strain of a) and preferably comprising an open reading frame for a diaminobutyrate-2-oxoglutarate-transaminase comprising an amino acid sequence of, in the order of rising preference, at least 80%, 81%, 82%, 83%, 84%, 85%, 86%, 87%, 88%, 89%, 90%, 91%, 92%, 93%, 94%, 95%, 96%, 97%, 98%, 99%, or 100% sequence identity to SEQ ID NO: 217.

[0176] Preferably, the microorganism of b) is not sensitive to the presence of the Paenibacillus species strain of a) but is sensitive to the presence of the parent strain of the Paenibacillus species strain of a).

[0177] A microorganism of b) is sensitive to the presence of the parent strain of the Paenibacillus species strain of a), if it shows a reduced or no growth in the presence of the parent strain of the Paenibacillus species strain of a) in comparison to growth when grown under the same conditions and inoculum strength but in the presence of the Paenibacillus species strain of a).

[0178] In case the parent strain of the Paenibacillus species strain of a) is not available the parent strain of the Paenibacillus species strain of a) can be replaced by a Paenibacillus species strain having an ANI-Value of, in the order of rising preference, at least 98.0%, 98.1%, 98.2%, 98.3%, 98.4%, 98.5%, 98.6%, 98.7%, 98.8%, 98.9%, 99.0%, 99.1%, 99.2%, 99.3%, 99.4%, 99.5%, 99.6%, 99.7%, 99.8%, or 99.9% to the Paenibacillus species strain of a) and preferably comprising an open reading frame for a diaminobutyrate-2-oxoglutarate-transaminase comprising an amino acid sequence of, in the order of rising preference, at least 80%, 81%, 82%, 83%, 84%, 85%, 86%, 87%, 88%, 89%, 90%, 91%, 92%, 93%, 94%, 95%, 96%, 97%, 98%, 99%, or 100% sequence identity to SEQ ID NO: 217.

[0179] The microorganism of b) can belong to any fungal or bacterial species, preferably it belongs to a Gram-positive or Gram-negative bacterial species.

[0180] In a preferred embodiment the microorganism of b) is selected from Azotobacter, Azospirillum, Pseudomonas, Burkholderia, Paraburkholderia, Rhizobium, Bradyrhizobium, Sinorhizobium, Mesorhizobium, Bacillus or Streptomyces.

[0181] Preferred species of the genus Rhizobium are:

[0182] Rhizobium phaseoli, preferably the strain DSM30137 (also known as strain ATCC 14482), Rhizobium radiobacter (formerly Agrobacterium radiobacter), preferably the strains DSM30205 or K1026.

[0183] In one embodiment the microorganism of b) is selected from Rhizobium strains having an ANI-Value of, in the order of rising preference, at least 95%, 96%, 97%, 98.0%, 98.1%, 98.2%, 98.3%, 98.4%, 98.5%, 98.6%, 98.7%, 98.8%, 98.9%, 99.0%, 99.1%, 99.2%, 99.3%, 99.4%, 99.5%, 99.6%, 99.7%, 99.8%, or 99.9% to the genome of Rhizobium phaseoli strain ATCC 14482 (GenBank AccNo: RJJV00000000.1), Rhizobium leguminosarum bv. viceae strain 3841 (GenBank AccNo: AM236080.1), Rhizobium leguminosarum bv. viceae strain 1435 or Rhizobium leguminosarum bv. phaseoli strain FA23 (GenBank AccNo: ATTN00000000).

[0184] Preferred species of the genus Bradyrhizobium are:

[0185] Bradyrhizobium japonicum, preferably the strains 532C, USDA 110, USDA 122, USDA 135 and USDA 4.

[0186] In one embodiment the microorganism of b) is selected from Bradyrhizobium strains having an ANI-Value of, in the order of rising preference, at least 95%, 96%, 97%, 98.0%, 98.1%, 98.2%, 98.3%, 98.4%, 98.5%, 98.6%, 98.7%, 98.8%, 98.9%, 99.0%, 99.1%, 99.2%, 99.3%, 99.4%, 99.5%, 99.6%, 99.7%, 99.8%, or 99.9% to the genome of B. japonicums strain 532C, B. japonicums strain USDA 110, (GenBank AccNo: BA000040), B. japonicums strain USDA 122, (GenBank AccNo: AXAX00000000), B. japonicums strain USDA 135 (GenBank AccNo: AXAT00000000), more B. japonicums strain USDA 4 (GenBank AccNo: AXAF00000000).

[0187] Preferred species of the genus Paraburkholderia are:

[0188] Paraburkholderia phytofirmans, preferably the strains DSM17436 and PsJN.

[0189] In one embodiment the microorganism of b) is selected from Paraburkholderia strains having an ANI-Value of, in the order of rising preference, at least 95%, 96%, 97%, 98.0%, 98.1%, 98.2%, 98.3%, 98.4%, 98.5%, 98.6%, 98.7%, 98.8%, 98.9%, 99.0%, 99.1%, 99.2%, 99.3%, 99.4%, 99.5%, 99.6%, 99.7%, 99.8%, or 99.9% to the genome of P. phytofirmans strain PsJN (GenBank AccNo: AAUH01000000).

[0190] Preferred species of the genus Pseudomonas are:

[0191] Pseudomonas koreensis, preferably the strains (IA-250_TP_15), Pseudomonas chlororaphis, preferably the strains MA342 and AFS009.

[0192] In one embodiment the microorganism of b) is selected from Pseudomonas strains having an ANI-Value of, in the order of rising preference, at least 95%, 96%, 97%, 98.0%, 98.1%, 98.2%, 98.3%, 98.4%, 98.5%, 98.6%, 98.7%, 98.8%, 98.9%, 99.0%, 99.1%, 99.2%, 99.3%, 99.4%, 99.5%, 99.6%, 99.7%, 99.8%, or 99.9% to the genome of at least one of P. koreensis strain: D26 (GenBank AccNo: CP014947), P. koreensis strain C112 (GenBank AccNo: MPLD00000000), P. koreensis strain CRS05-R5 (GenBank AccNo: CP015852), P. chlororaphis strain O6 (GenBank AccNo: CM001490.1), P. chlororaphis strain HT66 (GenBank AccNo: ATBG00000000), or P. chlororaphis strain UFB2 (GenBank AccNo: CP011020).

[0193] Preferred species of the genus Bacillus are:
[0194] Bacillus amyloliquefaciens, preferably the strains 71 (NRRL B-67021), PTA-4838, F727, D747, ENV503, FZB24, FZB42, H2 and RT1301,
[0195] Bacillus paralicheniformis, preferably the strain RT184,
[0196] Bacillus licheniformis, preferably the strains ATCC 14580 or FMCH001,
[0197] Bacillus subtilis, preferably the strains FMCH002, RT1477, AB/BS03, HAI-0404, QST713, Y1336, IAB/BS03 and BU1814,
[0198] Bacillus mycoides, preferably the strain BMJ,
[0199] Bacillus firmus, preferably the strains NCIM 2637 and I-1582,
[0200] Bacillus pumilus, preferably the strains QST2808 and F33 (syn. INR7, AP18, F-22, BU 1433),
[0201] Bacillus simplex, preferably the strain ABU-288,
[0202] Bacillus sp., preferably the strain ITB105,
[0203] Bacillus thuringiensis subsp. kurstaki, preferably the strains EG 2348, EVB-113-19, ABTS 351, PB 54, SA11, SA12 and EG 2348,
[0204] Bacillus thuringiensis subsp. aizawai, preferably the strains ABTS-1857 and GC-91,
[0205] Bacillus thuringiensis subsp. israeliensis, preferably the strain AM65-52, and Bacillus velezensis preferably the strain MBI600. Some of the strains listed above are also known under different species names, e.g. strains MBI600 and QST713 had been allocated to the species Bacillus subtilis, to the species Bacillus velezensis and the species Bacillus amyloliquefaciens.

[0206] In one embodiment the microorganism of b) is selected from Bacillus strains having an ANI-Value of, in the order of rising preference, at least 95%, 96%, 97%, 98.0%, 98.1%, 98.2%, 98.3%, 98.4%, 98.5%, 98.6%, 98.7%, 98.8%, 98.9%, 99.0%, 99.1%, 99.2%, 99.3%, 99.4%, 99.5%, 99.6%, 99.7%, 99.8%, or 99.9% to the genome of at least one of B. velezensis strain QST713 (GenBank AccNo: CP025079), B. amyloliquefaciens FZB42 (GenBank AccNo: CP000560), B. amyloliquefaciens GB03 (GenBank AccNo: AYTJ00000000), B. velezensis MBI600 (GenBank AccNo: CP033205.1) or Bacillus licheniformis ATCC 14580 (GenBank AccNo: CP034569), preferably to the genome of B. velezensis MBI600 or Bacillus licheniformis ATCC 14580.

[0207] Preferred species of the genus Streptomyces are:

[0208] Streptomyces griseoviridis, preferably the strain K61, and Streptomyces lydicus, preferably the strain WYEC 108.

[0209] In one embodiment the microorganism of b) is selected from Streptomyces strains having an ANI-Value of, in the order of rising preference, at least 95%, 96%, 97%, 98.0%, 98.1%, 98.2%, 98.3%, 98.4%, 98.5%, 98.6%, 98.7%, 98.8%, 98.9%, 99.0%, 99.1%, 99.2%, 99.3%, 99.4%, 99.5%, 99.6%, 99.7%, 99.8%, or 99.9% to the genome of at least one of Str. griseoviridis strain K61 (GenBank AccNo: CP029078), Str. griseoviridis strain F1-27 (GenBank AccNo: CP034687), Str. lydicus strain WYEC 108 (GenBank AccNo: CP029042) or Str. lydicus strain ATCC 25470 (GenBank AccNo: RDTD01000000), preferably to Str. lydicus strain WYEC 108.

[0210] Preferably the Rhizobium, Bradyrhizobium, Paraburkholderia, Pseudomonas, Bacillus, Streptomyces strains are not sensitive to the presence Paenibacillus species strain of a) but are sensitive to the presence of the parent strain of the Paenibacillus species strain of a) or a Paenibacillus species strain having an ANI-Value of, in the order of rising preference, at least 95%, 96%, 97%, 98.0%, 98.1%, 98.2%, 98.3%, 98.4%, 98.5%, 98.6%, 98.7%, 98.8%, 98.9%, 99.0%, 99.1%, 99.2%, 99.3%, 99.4%, 99.5%, 99.6%, 99.7%, 99.8%, or 99.9% to the Paenibacillus species strain of a) and preferably comprising an open reading frame for a diaminobutyrate-2-oxoglutarate-transaminase comprising an amino acid sequence of, in the order of rising preference, at least 80%, 81%, 82%, 83%, 84%, 85%, 86%, 87%, 88%, 89%, 90%, 91%, 92%, 93%, 94%, 95%, 96%, 97%, 98%, 99%, or 100% sequence identity to SEQ ID NO: 217.

[0211] Preferably the microorganism of b) is selected from the species Rhizobium phaseoli Rhizobium radiobacter, Bradyrhizobium japonicum Pseudomonas koreensis, Paraburkholderia phytofirmans, Bacillus licheniformis, Streptomyces lydicus, Bacillus subtilis or Bacillus velezensis.

[0212] In one embodiment the microorganism of b) is selected from the strains:

[0213] Rhizobium phaseoli strain DSM30137, Rhizobium radiobacter strain DSM30205, Bradyrhizobium japonicum strain 532C, Pseudomonas koreensis strain (IA-250_TP_15), Paraburkholderia phytofirmans strain DSM17436, Bacillus licheniformis strain DSM13, Streptomyces lydicus strain WYEC 108, Bacillus subtilis strain BU1814, Bacillus velezensis strain MBI600.

[0214] In one embodiment the Paenibacillus species strain of a) does not comprise a functional diaminobutyrate-2-oxoglutarate-transaminase, preferably does not comprise a functional diaminobutyrate-2-oxoglutarate-transaminase comprising an amino acid sequence of, in the order of rising preference, at least 90%, 91%, 92%, 93%, 94%, 95%, 96%, 97%, 98%, 99%, or 100% sequence identity to at least one of SEQ ID NO: 217, 218, 219, 220 or 221.

[0215] In one embodiment the Paenibacillus species strain of a) does not produce colistin and the microorganism of b) is sensitive to colistin,
[0216] more preferred the Paenibacillus species strain of a) does not produce a polymyxin and the microorganism of b) is sensitive to at least one polymyxin.

[0217] In one embodiment the Paenibacillus species strain of a) does not produce tridecaptin M, and the microorganism of b) is sensitive to tridecaptin M,
[0218] preferably the Paenibacillus species strain of a) does not produce tridecaptin A, B, or M and the microorganism of b) is sensitive to tridecaptin A, B, and M.
[0219] more preferred the Paenibacillus species strain of a) does not produce any tridecaptin and the microorganism of b) is sensitive to at least one tridecaptin.

[0220] In one embodiment the Paenibacillus species strain of a) does not produce tridecaptin M and colistin, and the microorganism of b) is sensitive to at least one of tridecaptin M or colistin, preferably the Paenibacillus species strain of a) does not produce tridecaptin A, B, M and colistin and the microorganism of b) is sensitive to at least one of tridecaptin A, B, M and colistin, more preferred the Paenibacillus species strain of a) does not produce any tridecaptin and does not produce any polymyxin and the microorganism of b) is sensitive to at least one tridecaptin or at least one polymyxin or at least one tridecaptin and at least one polymyxin.

[0221] In another embodiment the Paenibacillus species strain of a) does not comprise an open reading frame for a diaminobutyrate-2-oxoglutarate-transaminase comprising an amino acid sequence of, in the order of rising preference, at least 90%, 91%, 92%, 93%, 94%, 95%, 96%, 97%, 98%, 99%, or 100% sequence identity to at least one of SEQ ID NO: 217, 218, 219, 220 or 221.

[0222] In another embodiment the Paenibacillus species strain of a) does not comprise an open reading frame for a diaminobutyrate-2-oxoglutarate-transaminase comprising an amino acid sequence of, in the order of rising preference, at least 90%, 91%, 92%, 93%, 94%, 95%, 96%, 97%, 98%, 99%, or 100% sequence identity to at least one of SEQ ID NO: 217, 218, 219, 220 or 221 and does not comprise a polynucleotide sequence encoding an amino acid sequence of at least 90% sequence identity to SEQ ID NO: 1.

[0223] In one embodiment the Paenibacillus species strain of a) does comprise an open reading frame for a diaminobutyrate-2-oxoglutarate-transaminase comprising an amino acid sequence of, in the order of rising preference, at least 80%, 81%, 82%, 83%, 84%, 85%, 86%, 87%, 88%, 89%, 90%, 91%, 92%, 93%, 94%, 95%, 96%, 97%, 98%, 99%, or 100% sequence identity to at least one of SEQ ID NO: 217, 218, 219, 220 or 221, but comprises a polynucleotide sequence encoding an amino acid sequence of, in the order of rising preference, at least 80%, 81%, 82%, 83%, 84%, 85%, 86%, 87%, 88%, 89%, 90%, 91%, 92%, 93%, 94%, 95%, 96%, 97%, 98%, 99%, or 100% sequence identity to SEQ ID NO: 1, but does not produce polymyxin or tridecaptin or does not produce polymyxin and does not produce tricecaptin.

[0224] In another embodiment the Paenibacillus species strain of a) does not comprise an open reading frame for a diaminobutyrate-2-oxoglutarate-transaminase comprising an amino acid sequence of, in the order of rising preference, at least 80%, 81%, 82%, 83%, 84%, 85%, 86%, 87%, 88%, 89%, 90%, 91%, 92%, 93%, 94%, 95%, 96%, 97%, 98%, 99%, or 100% sequence identity to at least one of SEQ ID NO: 217, 218, 219, 220 or 221, but comprises a polynucleotide sequence encoding an amino acid sequence of, in the order of rising preference, at least 80%, 81%, 82%, 83%, 84%, 85%, 86%, 87%, 88%, 89%, 90%, 91%, 92%, 93%, 94%, 95%, 96%, 97%, 98%, 99%, or 100% sequence identity to SEQ ID NO: 1.

[0225] In another embodiment the Paenibacillus species strain of a) does not comprise an open reading frame for a diaminobutyrate-2-oxoglutarate-transaminase comprising an amino acid sequence of, in the order of rising preference, at least 80%, 81%, 82%, 83%, 84%, 85%, 86%, 87%, 88%, 89%, 90%, 91%, 92%, 93%, 94%, 95%, 96%, 97%, 98%, 99%, or 100% sequence identity to at least one of SEQ ID NO: 217, 218, 219, 220 or 221, but comprises a polynucleotide sequence encoding an amino acid sequence of, in the order of rising preference, at least 80%, 81%, 82%, 83%, 84%, 85%, 86%, 87%, 88%, 89%, 90%, 91%, 92%, 93%, 94%, 95%, 96%, 97%, 98%, 99%, or 100% sequence identity to SEQ ID NO: 1, but does not produce tridecaptin A, B, or M, preferably does not produce tridecaptins.

[0226] In another embodiment the Paenibacillus species strain of a) does not comprise an open reading frame for a diaminobutyrate-2-oxoglutarate-transaminase comprising an amino acid sequence of, in the order of rising preference, at least 80%, 81%, 82%, 83%, 84%, 85%, 86%, 87%, 88%, 89%, 90%, 91%, 92%, 93%, 94%, 95%, 96%, 97%, 98%, 99%, or 100% sequence identity to at least one of SEQ ID NO: 217, 218, 219, 220 or 221, but comprises a polynucleotide sequence encoding an amino acid sequence of, in the order of rising preference, at least 80%, 81%, 82%, 83%, 84%, 85%, 86%, 87%, 88%, 89%, 90%, 91%, 92%, 93%, 94%, 95%, 96%, 97%, 98%, 99%, or 100% sequence identity to SEQ ID NO: 1, but does not produce tridecaptins, preferably does not produce tridecaptin A, B, or M and does not produce colistin, preferably does not produce polymyxins.

[0227] In another embodiment the Paenibacillus species strain of a) does not comprise an open reading frame for a diaminobutyrate-2-oxoglutarate-transaminase comprising an amino acid sequence of, in the order of rising preference, at least 90%, 91%, 92%, 93%, 94%, 95%, 96%, 97%, 98%, 99%, or 100% sequence identity to at least one of SEQ ID NO: 217, 218, 219, 220 or 221 and the microorganism of b) is not sensitive to the presence of the Paenibacillus species strain of a), but is sensitive to the presence of the parent strain of the Paenibacillus species strain of a).

[0228] In another embodiment the Paenibacillus species strain of a) does not comprise an open reading frame for a diaminobutyrate-2-oxoglutarate-transaminase comprising an amino acid sequence of, in the order of rising preference, at least 80%, 81%, 82%, 83%, 84%, 85%, 86%, 87%, 88%, 89%, 90%, 91%, 92%, 93%, 94%, 95%, 96%, 97%, 98%, 99%, or 100% sequence identity to at least one of SEQ ID NO: 217, 218, 219, 220 or 221 and the microorganism of b) is sensitive to at least one of polymyxin, tridecaptin, polypeptin, paenilipoheptin, octapeptin, jolipeptin, gavaserin or saltavalin and is sensitive to the presence of the parent strain of the Paenibacillus species strain of a).

[0229] In another embodiment the Paenibacillus species strain of a) comprises no or only one locus encoding an amino acid sequence comprising, in the order of rising preference, at least 80%, 81%, 82%, 83%, 84%, 85%, 86%, 87%, 88%, 89%, 90%, 91%, 92%, 93%, 94%, 95%, 96%, 97%, 98%, 99%, or 100% sequence identity to SEQ ID NO: 1 and does not produce polymyxin or tridecaptin. Preferably, the parent strain of the Paenibacillus species strain of a) comprises at least one locus encoding an amino acid sequence comprising, in the order of rising preference, at least 80%, 81%, 82%, 83%, 84%, 85%, 86%, 87%, 88%, 89%, 90%, 91%, 92%, 93%, 94%, 95%, 96%, 97%, 98%, 99%, or 100% sequence identity to SEQ ID NO: 1 and does produce at least one tridecaptin or does preferably produce at least one polymyxin and at least one tridecaptin.

[0230] In a further embodiment, the Paenibacillus species strain of a) comprises only one genetic locus comprising, in the order of rising preference, at least 80%, 81%, 82%, 83%, 84%, 85%, 86%, 87%, 88%, 89%, 90%, 91%, 92%, 93%, 94%, 95%, 96%, 97%, 98%, 99%, or 100% sequence identity to a polynucleotide sequence of any one of SEQ IN NOs: 222, 223, 224, 225, 413, 414, 415, 416, 417, 418 and does not comprise an open reading frame for a diaminobutyrate-2-oxoglutarate-transaminase comprising an amino acid sequence of, in the order of rising preference, at least 80%, 81%, 82%, 83%, 84%, 85%, 86%, 87%, 88%, 89%, 90%, 91%, 92%, 93%, 94%, 95%, 96%, 97%, 98%, 99%, or 100% identity to SEQ ID NO: 217. Preferably, the parent strain of the Paenibacillus species strain of a) comprises at least one genetic locus comprising, in the order of rising preference, at least 80%, 81%, 82%, 83%, 84%, 85%, 86%, 87%, 88%, 89%, 90%, 91%, 92%, 93%, 94%, 95%, 96%, 97%, 98%, 99%, or 100% sequence identity to a polynucleotide sequence of any one of SEQ IN NOs: 222, 223, 224, 225 and does comprise an open reading frame for a diaminobutyrate-2-oxoglutarate-transaminase comprising an amino acid sequence of, in the order of rising preference, at least 80%, 81%, 82%, 83%, 84%, 85%, 86%, 87%, 88%, 89%, 90%, 91%, 92%, 93%, 94%, 95%, 96%, 97%, 98%, 99%, or 100% identity to SEQ ID NO: 217.

[0231] In a further embodiment, the Paenibacillus species strain of a) does not comprise a polynucleotide sequence encoding an amino acid sequence comprising, in the order of rising preference, at least 80%, 81%, 82%, 83%, 84%, 85%, 86%, 87%, 88%, 89%, 90%, 91%, 92%, 93%, 94%, 95%, 96%, 97%, 98%, 99%, or 100% sequence identity to SEQ ID NO: 1. Preferably, the parent strain of the Paenibacillus species strain of a) comprises at least two polynucleotide sequence encoding an amino acid sequence comprising, in the order of rising preference, at least 80%, 81%, 82%, 83%, 84%, 85%, 86%, 87%, 88%, 89%, 90%, 91%, 92%, 93%, 94%, 95%, 96%, 97%, 98%, 99%, or 100% sequence identity to SEQ ID NO: 1, wherein the two polynucleotides sequences comprise at least, in the order of rising preference, 90%, 91%, 92%, 93%, 94%, 95%, 96%, 97%, 98%, 99%, or 100% sequence identity to each other.

[0232] In a further embodiment, the Paenibacillus species strain of a) does not comprise a continuous genome fragment of, in the order of rising preference, less than 350, 340, 330, 320, 310 or 300 kilobases, which comprises a plurality of, preferably at least 147, open reading frames encoding polypeptide sequences of, in the order of rising preference, at least 90%, 91%, 92%, 93%, 94%, 95%, 96%, 97%, 98%, 99%, or 100% sequence identity
[0233] a) to the amino acid sequences of SEQ ID NOs: 2, 3, 5, 7, 8, 9, 10, 11, 12, 13, 14, 15, 16, 17, 18, 19, 20, 21, 22, 23, 25, 27, 28, 30, 31, 32, 34, 36, 37, 38, 39, 40, 41, 44, 45, 47, 48, 50, 51, 52, 53, 54, 55, 58, 60, 61, 62, 63, 64, 65, 66, 67, 68, 69, 70, 72, 77, 78, 79, 80, 81, 82, 83, 84, 86, 87, 89, 91, 92, 93, 94, 95, 96, 97, 98, 100, 101, 102, 103, 104, 105, 107, 108, 109, 110, 111, 112, 113, 114, 115, 116, 117, 118, 119, 120, 122, 124, 125, 126, 127, 128, 129, 130, 132, 133, 134, 135, 136, 137, 138, 139, 140, 141, 142, 143, 144, 145, 146, 147, 148, 149, 150, 151, 152, 153, 154, 155, 156, 157, 158, 159, 161, 162, 163, 164, 165, 166, 167, 169, 170, 174, 175, 176, 177, 178, 180, 181, or
[0234] b) to the amino acid sequences of SEQ ID NOs: 241, 242, 244, 245, 246, 247, 248, 249, 250, 251, 252, 253, 254, 255, 256, 257, 258, 259, 260, 261, 262, 263, 264, 265, 266, 267, 268, 269, 270, 271, 272, 273, 274, 275, 276, 277, 278, 279, 280, 281, 282, 283, 284, 285, 286, 287, 288, 289, 290, 291, 292, 293, 294, 295, 296, 297, 298, 299, 300, 301, 302, 303, 304, 305, 306, 307, 309, 310, 311, 312, 313, 314, 315, 316, 317, 318, 319, 320, 321, 322, 323, 324, 325, 326, 327, 328, 329, 330, 331, 332, 333, 347, 348, 349, 350, 351, 352, 353, 354, 355, 356, 357, 358, 360, 363, 363, 364, 365, 366, 367, 369, 370, 371, 372, 373, 374, 375, 376, 377, 378, 379, 380, 381, 382, 383, 384, 385, 387, 388, 389, 390, 391, 392, 393, 394, 395, 396, 397, 398, 399, 400, 401, 402, 403, 404, 405, 406, 407.

[0235] Preferably the genomic fragment lost due to the recombination event comprises at least one coding sequence of, in the order of rising preference, at least 90%, 91%, 92%, 93%, 94%, 95%, 96%, 97%, 98%, 99%, or 100% sequence identity for each one of the amino acid sequences listed above under a) or b), respectively.

[0236] Preferably, the parent strain of the Paenibacillus species strain of a) comprises a continuous genome fragment of, in the order of rising preference, less than 350, 340, 330, 320, 310 or 300 kilobases, which comprises at least 147 open reading frames encoding polypeptide sequences of at least 95% sequence identity
[0237] a) to the amino acid sequences of SEQ ID NOs: 2, 3, 5, 7, 8, 9, 10, 11, 12, 13, 14, 15, 16, 17, 18, 19, 20, 21, 22, 23, 25, 27, 28, 30, 31, 32, 34, 36, 37, 38, 39, 40, 41, 44, 45, 47, 48, 50, 51, 52, 53, 54, 55, 58, 60, 61, 62, 63, 64, 65, 66, 67, 68, 69, 70, 72, 77, 78, 79, 80, 81, 82, 83, 84, 86, 87, 89, 91, 92, 93, 94, 95, 96, 97, 98, 100, 101, 102, 103, 104, 105, 107, 108, 109, 110, 111, 112, 113, 114, 115, 116, 117, 118, 119, 120, 122, 124, 125, 126, 127, 128, 129, 130, 132, 133, 134, 135, 136, 137, 138, 139, 140, 141, 142, 143, 144, 145, 146, 147, 148, 149, 150, 151, 152, 153, 154, 155, 156, 157, 158, 159, 161, 162, 163, 164, 165, 166, 167, 169, 170, 174, 175, 176, 177, 178, 180, 181, or
[0238] b) to the amino acid sequences of SEQ ID NOs: 241, 242, 244, 245, 246, 247, 248, 249, 250, 251, 252, 253, 254, 255, 256, 257, 258, 259, 260, 261, 262, 263, 264, 265, 266, 267, 268, 269, 270, 271, 272, 273, 274, 275, 276, 277, 278, 279, 280, 281, 282, 283, 284, 285, 286, 287, 288, 289, 290, 291, 292, 293, 294, 295, 296, 297, 298, 299, 300, 301, 302, 303, 304, 305, 306, 307, 309, 310, 311, 312, 313, 314, 315, 316, 317, 318, 319, 320, 321, 322, 323, 324, 325, 326, 327, 328, 329, 330, 331, 332, 333, 347, 348, 349, 350, 351, 352, 353, 354, 355, 356, 357, 358, 360, 363, 363, 364, 365, 366, 367, 369, 370, 371, 372, 373, 374, 375, 376, 377, 378, 379, 380, 381, 382, 383, 384, 385, 387, 388, 389, 390, 391, 392, 393, 394, 395, 396, 397, 398, 399, 400, 401, 402, 403, 404, 405, 406, 407.

[0239] Preferably the genomic fragment lost due to the recombination event comprises at least one coding sequence of, in the order of rising preference, at least 90%, 91%, 92%, 93%, 94%, 95%, 96%, 97%, 98%, 99%, or 100% sequence identity for each one of the amino acid sequences listed above under a) or b), respectively.

[0240] In a further embodiment, the Paenibacillus species strain of a), and/or the parent strain of, the Paenibacillus species strain of a), has an ANI-Value of at least 90%, 91%, 92%, 93%, 94%, 95%, 96%, 97%, 98.0%, 98.1%, 98.2%, 98.3%, 98.4%, 98.5%, 98.6%, 98.7%, 98.8%, 98.9%, 99.0%, 99.1%, 99.2%, 99.3%, 99.4%, 99.5%, 99.6%, 99.7%, 99.8%, or 99.9% to the genome of at least one strain selected from the group comprising: P. polymyxa LU17007, P. polymyxa M152, P. polymyxa SQR-21, P. polymyxa M1, P. polymyxa SC2, P. polymyxa HY96-2, P. polymyxa YC0136, P. polymyxa E681, P. polymyxa CR1, P. polymyxa J, P. polymyxa ZF197, P. polymyxa WLY78, P. ottowii strain MS2379, P. peoriae ZF390, P. peoriae HS311, P. kribbensis AM49, P. kribbensis PS04, P. terrae HPL-003, P. sp. Aloe-11.

[0241] In a further embodiment, the Paenibacillus species strain of a), and/or the parent strain of, the Paenibacillus species strain of a), has an ANI-Value of, in the order of rising preference, at least 98.0%, 98.1%, 98.2%, 98.3%, 98.4%, 98.5%, 98.6%, 98.7%, 98.8%, 98.9%, 99.0%, 99.1%, 99.2%, 99.3%, 99.4%, 99.5%, 99.6%, 99.7%, 99.8%, or 99.9%, to the genome of P. polymyxa LU17007 deposited as DSM 26970.

[0242] In a further embodiment, the Paenibacillus species strain of a), and/or the parent strain of, the Paenibacillus species strain of a), has an ANI-Value of, in the order of rising preference, at least 98.0%, 98.1%, 98.2%, 98.3%, 98.4%, 98.5%, 98.6%, 98.7%, 98.8%, 98.9%, 99.0%, 99.1%, 99.2%, 99.3%, 99.4%, 99.5%, 99.6%, 99.7%, 99.8%, or 99.9%, to the genome of P. polymyxa SQR-21.

[0243] It has been observed that the Paenibacillus species strains of the invention produces a modified spectrum of fusaricidins compared to their parent strains, in which fusaricidin compounds comprising glutamine have a higher concentration than the respective fusaricidin compound comprising asparagine at the respective position of the molecule. Without wishing to be bound to a particular hypothesis, this phenomenon could be due to a loss of the diaminobutyrate-2-oxoglutarate-transaminase, which would otherwise create a sink of glutamate by producing DAB, thereby enhancing the pool of glutamine available for the production of glutamine comprising fusaricidin compounds.

[0244] Accordingly, another part of the invention is a Paenibacillus species strain producing more of at least one glutamine comprising fusaricidin, paeniprolixin or paeniserine than of its respective asparagine comprising counterpart.

[0245] A glutamine comprising counterpart of a given fusaricidin is a fusaricidin comprising the same structure in its lipid part and comprising the same sequence of amino acid building blocks in its peptide part except for one amino acid in which the asparagine is exchanged for glutamine, for example, fusaricidin A and fusaricidin B are considered counterparts.

[0246] Preferably, the Paenibacillus species strain produces
[0247] a) more fusaricidin LiF04b (Fus B) than fusaricidin LiF04a (Fus A), or
[0248] b) more fusaricidin LiF03b than fusaricidin LiF03a, or
[0249] c) more fusaricidin LiF05b than fusaricidin LiF05a, or
[0250] d) more fusaricidin LiF06b than fusaricidin LiF06a, or
[0251] e) more fusaricidin LiF07b than fusaricidin LiF07a, or
[0252] f) any combination of a), b), c), d) and e).

[0253] In one embodiment the Paenibacillus species strain produces more fusaricidin LiF04b (Fus B) than fusaricidin LiF04a (Fus A).

[0254] Preferably the Paenibacillus species strain producing more of at least one glutamine comprising fusaricidin, paeniprolixin or paeniserine than of its respective asparagine comprising counterpart in comparison to a Paenibacillus species strain having an ANI-Value of, in the order of rising preference, at least 98.0%, 98.1%, 98.2%, 98.3%, 98.4%, 98.5%, 98.6%, 98.7%, 98.8%, 98.9%, 99.0%, 99.1%, 99.2%, 99.3%, 99.4%, 99.5%, 99.6%, 99.7%, 99.8%, or 99.9% to the Paenibacillus species strain, and preferably comprising an open reading frame for a diaminobutyrate-2-oxoglutarate-transaminase comprising an amino acid sequence of, in the order of rising preference, at least 80%, 81%, 82%, 83%, 84%, 85%, 86%, 87%, 88%, 89%, 90%, 91%, 92%, 93%, 94%, 95%, 96%, 97%, 98%, 99%, or 100% sequence identity to SEQ ID NO: 217, preferably the comparison is performed with the parent Paenibacillus species strain.

[0255] In another embodiment the Paenibacillus species strain producing more of at least one glutamine comprising fusaricidin, paeniprolixin or paeniserine than of its respective asparagine comprising counterpart does not comprise an open reading frame for a diaminobutyrate-2-oxoglutarate-transaminase comprising an amino acid sequence of, in the order of rising preference, at least 80%, 81%, 82%, 83%, 84%, 85%, 86%, 87%, 88%, 89%, 90%, 91%, 92%, 93%, 94%, 95%, 96%, 97%, 98%, 99%, or 100% sequence identity to SEQ ID NO: 217.

[0256] In another embodiment the Paenibacillus species strain producing more of at least one glutamine comprising fusaricidin, paeniprolixin or paeniserine than of its respective asparagine comprising counterpart comprises no or only one locus encoding an amino acid sequence comprising, in the order of rising preference, at least 80%, 81%, 82%, 83%, 84%, 85%, 86%, 87%, 88%, 89%, 90%, 91%, 92%, 93%, 94%, 95%, 96%, 97%, 98%, 99%, or 100% sequence identity to SEQ ID NO: 1 and does not produce polymyxin or tridecaptin. Preferably, the parent strain of the Paenibacillus species strain of a) comprises at least one locus encoding an amino acid sequence comprising, in the order of rising preference, at least 80%, 81%, 82%, 83%, 84%, 85%, 86%, 87%, 88%, 89%, 90%, 91%, 92%, 93%, 94%, 95%, 96%, 97%, 98%, 99%, or 100% sequence identity to SEQ ID NO: 1 and does produce at least one tridecaptin and does preferably produce at least one polymyxin and at least one tridecaptin.

[0257] In a further embodiment, the Paenibacillus species strain producing more of at least one glutamine comprising fusaricidin, paeniprolixin or paeniserine than of its respective asparagine comprising counterpart comprises only one genetic locus comprising, in the order of rising preference, at least 80%, 81%, 82%, 83%, 84%, 85%, 86%, 87%, 88%, 89%, 90%, 91%, 92%, 93%, 94%, 95%, 96%, 97%, 98%, 99%, or 100% sequence identity to a polynucleotide sequence of any one of SEQ IN NOs: 222, 223, 224, 225, 413, 414, 415, 416, 417, 418 and does not comprise an open reading frame for a diaminobutyrate-2-oxoglutarate-transaminase comprising an amino acid sequence of, in the order of rising preference, at least 80%, 81%, 82%, 83%, 84%, 85%, 86%, 87%, 88%, 89%, 90%, 91%, 92%, 93%, 94%, 95%, 96%, 97%, 98%, 99%, or 100% identity to SEQ ID NO: 217. Preferably, the parent strain of the Paenibacillus species strain of a) comprises at least one genetic locus comprising, in the order of rising preference, at least 80%, 81%, 82%, 83%, 84%, 85%, 86%, 87%, 88%, 89%, 90%, 91%, 92%, 93%, 94%, 95%, 96%, 97%, 98%, 99%, or 100% sequence identity to a polynucleotide sequence of any one of SEQ IN NOs: 222, 223, 224, 225 and does comprise an open reading frame for a diaminobutyrate-2-oxoglutarate-transaminase comprising an amino acid sequence of, in the order of rising preference, at least 80%, 81%, 82%, 83%, 84%, 85%, 86%, 87%, 88%, 89%, 90%, 91%, 92%, 93%, 94%, 95%, 96%, 97%, 98%, 99%, or 100% identity to SEQ ID NO: 217.

[0258] In a further embodiment, the Paenibacillus species strain producing more of at least one glutamine comprising fusaricidin, paeniprolixin or paeniserine than of its respective asparagine comprising counterpart does not comprise a polynucleotide sequence encoding an amino acid sequence comprising, in the order of rising preference, at least 80%, 81%, 82%, 83%, 84%, 85%, 86%, 87%, 88%, 89%, 90%, 91%, 92%, 93%, 94%, 95%, 96%, 97%, 98%, 99%, or 100% sequence identity to SEQ ID NO: 1. Preferably, the parent strain of the Paenibacillus species strain of a) comprises at least one polynucleotide sequence encoding an amino acid sequence comprising, in the order of rising preference, at least 80%, 81%, 82%, 83%, 84%, 85%, 86%, 87%, 88%, 89%, 90%, 91%, 92%, 93%, 94%, 95%, 96%, 97%, 98%, 99%, or 100% sequence identity to SEQ ID NO: 1.

[0259] In a further embodiment, the Paenibacillus species strain producing more of at least one glutamine comprising fusaricidin, paeniprolixin or paeniserine than of its respective asparagine comprising counterpart does not comprise a continuous genome fragment of, in the order of rising preference, less than 350, 340, 330, 320, 310 or 300 kilobases, which comprises at least 147 open reading frames encoding polypeptide sequences of at least 95% sequence identity
[0260] c) to the amino acid sequences of SEQ ID NOs: 2, 3, 5, 7, 8, 9, 10, 11, 12, 13, 14, 15, 16, 17, 18, 19, 20, 21, 22, 23, 25, 27, 28, 30, 31, 32, 34, 36, 37, 38, 39, 40, 41, 44, 45, 47, 48, 50, 51, 52, 53, 54, 55, 58, 60, 61, 62, 63, 64, 65, 66, 67, 68, 69, 70, 72, 77, 78, 79, 80, 81, 82, 83, 84, 86, 87, 89, 91, 92, 93, 94, 95, 96, 97, 98, 100, 101, 102, 103, 104, 105, 107, 108, 109, 110, 111, 112, 113, 114, 115, 116, 117, 118, 119, 120, 122, 124, 125, 126, 127, 128, 129, 130, 132, 133, 134, 135, 136, 137, 138, 139, 140, 141, 142, 143, 144, 145, 146, 147, 148, 149, 150, 151, 152, 153, 154, 155, 156, 157, 158, 159, 161, 162, 163, 164, 165, 166, 167, 169, 170, 174, 175, 176, 177, 178, 180, 181, or
[0261] d) to the amino acid sequences of SEQ ID NOs: 241, 242, 244, 245, 246, 247, 248, 249, 250, 251, 252, 253, 254, 255, 256, 257, 258, 259, 260, 261, 262, 263, 264, 265, 266, 267, 268, 269, 270, 271, 272, 273, 274, 275, 276, 277, 278, 279, 280, 281, 282, 283, 284, 285, 286, 287, 288, 289, 290, 291, 292, 293, 294, 295, 296, 297, 298, 299, 300, 301, 302, 303, 304, 305, 306, 307, 309, 310, 311, 312, 313, 314, 315, 316, 317, 318, 319, 320, 321, 322, 323, 324, 325, 326, 327, 328, 329, 330, 331, 332, 333, 347, 348, 349, 350, 351, 352, 353, 354, 355, 356, 357, 358, 360, 363, 363, 364, 365, 366, 367, 369, 370, 371, 372, 373, 374, 375, 376, 377, 378, 379, 380, 381, 382, 383, 384, 385, 387, 388, 389, 390, 391, 392, 393, 394, 395, 396, 397, 398, 399, 400, 401, 402, 403, 404, 405, 406, 407.

[0262] Preferably, the parent strain of the Paenibacillus species strain producing more of at least one glutamine comprising fusaricidin, paeniprolixin or paeniserine than of its respective asparagine comprising counterpart comprises a continuous genome fragment of, in the order of rising preference, less than 350, 340, 330, 320, 310 or 300 kilobases, which comprises at least 147 open reading frames encoding polypeptide sequences of at least 95% sequence identity
[0263] a) to the amino acid sequences of SEQ ID NOs: 2, 3, 5, 7, 8, 9, 10, 11, 12, 13, 14, 15, 16, 17, 18, 19, 20, 21, 22, 23, 25, 27, 28, 30, 31, 32, 34, 36, 37, 38, 39, 40, 41, 44, 45, 47, 48, 50, 51, 52, 53, 54, 55, 58, 60, 61, 62, 63, 64, 65, 66, 67, 68, 69, 70, 72, 77, 78, 79, 80, 81, 82, 83, 84, 86, 87, 89, 91, 92, 93, 94, 95, 96, 97, 98, 100, 101, 102, 103, 104, 105, 107, 108, 109, 110, 111, 112, 113, 114, 115, 116, 117, 118, 119, 120, 122, 124, 125, 126, 127, 128, 129, 130, 132, 133, 134, 135, 136, 137, 138, 139, 140, 141, 142, 143, 144, 145, 146, 147, 148, 149, 150, 151, 152, 153, 154, 155, 156, 157, 158, 159, 161, 162, 163, 164, 165, 166, 167, 169, 170, 174, 175, 176, 177, 178, 180, 181, or
[0264] b) to the amino acid sequences of SEQ ID NOs: 241, 242, 244, 245, 246, 247, 248, 249, 250, 251, 252, 253, 254, 255, 256, 257, 258, 259, 260, 261, 262, 263, 264, 265, 266, 267, 268, 269, 270, 271, 272, 273, 274, 275, 276, 277, 278, 279, 280, 281, 282, 283, 284, 285, 286, 287, 288, 289, 290, 291, 292, 293, 294, 295, 296, 297, 298, 299, 300, 301, 302, 303, 304, 305, 306, 307, 309, 310, 311, 312, 313, 314, 315, 316, 317, 318, 319, 320, 321, 322, 323, 324, 325, 326, 327, 328, 329, 330, 331, 332, 333, 347, 348, 349, 350, 351, 352, 353, 354, 355, 356, 357, 358, 360, 363, 363, 364, 365, 366, 367, 369, 370, 371, 372, 373, 374, 375, 376, 377, 378, 379, 380, 381, 382, 383, 384, 385, 387, 388, 389, 390, 391, 392, 393, 394, 395, 396, 397, 398, 399, 400, 401, 402, 403, 404, 405, 406, 407.

[0265] In a further embodiment, the Paenibacillus species strain producing more of at least one glutamine comprising fusaricidin, paeniprolixin or paeniserine than of its respective asparagine comprising counterpart and/or its parent strain, has an ANI-Value of at least 90%, 91%, 92%, 93%, 94%, 95%, 96%, 97%, 98%, 99%, or 100% to the genome of at least one strain selected from the group comprising: P. polymyxa LU17007, P. polymyxa SQR-21, P. polymyxa M1, P. polymyxa SC2, P. polymyxa HY96-2, P. polymyxa YC0136, P. polymyxa E681, P. polymyxa CR1, P. polymyxa J, P. polymyxa ZF197, P. polymyxa WLY78, P. ottowii strain MS2379, P. peoriae ZF390, P. peoriae HS311, P. kribbensis AM49, P. kribbensis PS04, P. terrae HPL-003, P. sp. Aloe-11.

[0266] In a further embodiment, the Paenibacillus species strain producing more of at least one glutamine comprising fusaricidin, paeniprolixin or paeniserine than of its respective asparagine comprising counterpart and/or its parent strain has an ANI-Value of, in the order of rising preference, at least 98.0%, 98.1%, 98.2%, 98.3%, 98.4%, 98.5%, 98.6%, 98.7%, 98.8%, 98.9%, 99.0%, 99.1%, 99.2%, 99.3%, 99.4%, 99.5%, 99.6%, 99.7%, 99.8%, 99.9%, or 100.0% to the genome of P. polymyxa LU17007 deposited as DSM 26970.

[0267] In a further embodiment, the Paenibacillus species strain producing more of at least one glutamine comprising fusaricidin, paeniprolixin or paeniserine than of its respective asparagine comprising counterpart and/or its parent strain has an ANI-Value of, in the order of rising preference, at least 98.0%, 98.1%, 98.2%, 98.3%, 98.4%, 98.5%, 98.6%, 98.7%, 98.8%, 98.9%, 99.0%, 99.1%, 99.2%, 99.3%, 99.4%, 99.5%, 99.6%, 99.7%, 99.8%, 99.9%, or 100.0% to the genome of P. polymyxa SQR-21.

[0268] The Paenibacillus species strains of the invention and the mixtures of these Paenibacillus species strains are usually cultured in culture broth. This culture broth can then directly be dried by technologies available in the art, e.g. via spray drying, or can first be separated in a fraction comprising the spores of the Paenibacillus species strain and other solid parts of the culture medium and another fraction, comprising the liquid parts of the culture broth i.e. the cell-free culture broth, via technologies available in the art, e.g. via centrifugation or filtration, and then either used in liquid or wet form or further dried to produce a powder. All of these as well as the whole culture broth comprising the liquid components and the spores and cells of the Paenibacillus species strain, can also be extracted to produce a cell-free extract comprising secondary compounds, preferably comprising at least one fusaricidin compound.

[0269] Accordingly, another part of the invention is a whole culture broth, spores, cell-free culture broth or cell-free extract comprising a higher amount of at least one glutamine comprising fusaricidin, paeniprolixin or paeniserine compound than the amount of its respective asparagine comprising counterpart.

[0270] A further part of the invention is a method to produce a whole culture broth, spores, cell-free culture broth or cell-free extract, comprising the steps of a) providing a pure culture of a Paenibacillus species strain of the invention, b) growing it in a culture broth and c) harvesting the whole culture broth, spores or cell-free culture broth and optionally d) extracting the whole culture broth, spores or cell-free culture broth.

[0271] The whole culture broth, spores, cell-free culture broth of the Paenibacillus species strain of the invention or cell-free extracts thereof and agricultural compositions comprising whole culture broth, spores, cell-free culture broth of the Paenibacillus species strain of the invention or cell-free extracts thereof can be used in methods for controlling, suppressing or preventing fungal infection of plants comprising the steps of
[0272] a) providing a whole culture broth, spores, cell-free culture broth of the Paenibacillus species strain of the invention or a cell-free extract of at least one of these and
[0273] b) applying an effective amount of the whole culture broth, spores, cell-free culture broth of the Paenibacillus species strain of the invention or the cell-free extract to the plant pathogenic fungi, their habitat, the host plants, plant propagation material or the soil used to grow the plant.

[0274] The Paenibacillus species strains of the invention and the mixtures of these Paenibacillus species strains and a further microorganism can be used to prepare agrochemical compositions, comprising these Paenibacillus species strains or mixtures and an auxiliary.

[0275] The agricultural compositions are preferably customary types of agrochemical compositions, e.g. solutions, emulsions, suspensions, dusts, powders, pastes, granules, pressings, capsules, and mixtures thereof. Examples for composition types (see also “Catalogue of pesticide formulation types and international coding system”, Technical Monograph No. 2, 6^{th} Ed. May 2008, CropLife International) are suspensions (e.g. SC, OD, FS), emulsifiable concentrates (e.g. EC), emulsions (e.g. EW, EO, ES, ME), capsules (e.g. CS, ZC), pastes, pastilles, wettable powders or dusts (e.g. WP, SP, WS, DP, DS), pressings (e.g. BR, TB, DT), granules (e.g. WG, SG, GR, FG, GG, MG), insecticidal articles (e.g. LN), as well as gel formulations for the treatment of plant propagation materials, such as seeds (e.g. GF). The compositions are prepared in a known manner, such as described by Mollet and Grubemann, Formulation technology, Wiley VCH, Weinheim, 2001; or by Knowles, New developments in crop protection product formulation, Agrow Reports DS243, T&F Informa, London, 2005. The invention also relates to agrochemical compositions comprising an Paenibacillus strain of the invention and an auxiliary. Suitable auxiliaries are solvents, liquid carriers, solid carriers or fillers, surfactants, dispersants, emulsifiers, wetters, adjuvants, solubilizers, penetration enhancers, protective colloids, adhesion agents, thickeners, humectants, repellents, attractants, feeding stimulants, compatibilizers, bactericides, anti-freezing agents, anti-foaming agents, colorants, tackifiers, and binders. Suitable solvents and liquid carriers are water and organic solvents, such as mineral oil fractions of medium to high boiling point, e.g. kerosene, diesel oil; oils of vegetable or animal origin; aliphatic, cyclic and aromatic hydrocarbons, e.g. toluene, paraffin, tetrahydronaphthalene, and alkylated naphthalenes; alcohols, e.g. ethanol, propanol, butanol, benzyl alcohol, cyclohexanol, glycols; DMSO; ketones, e.g. cyclohexanone; esters, e.g. lactates, carbonates, fatty acid esters, gamma-butyrolactone; fatty acids; phosphonates; amines; amides, e.g. N-methyl pyrrolidone, fatty acid dimethyl amides; and mixtures thereof.

[0276] Suitable solid carriers or fillers are mineral earths, e.g. silicates, silica gels, talc, kaolins, limestone, lime, chalk, clays, dolomite, diatomaceous earth, bentonite, calcium sulfate, magnesium sulfate, magnesium oxide; polysaccharides, e.g. cellulose, starch; fertilizers, e.g. ammonium sulfate, ammonium phosphate, ammonium nitrate, ureas; products of vegetable origin, e.g. cereal meal, tree bark meal, wood meal, nutshell meal, and mixtures thereof.

[0277] Suitable surfactants are surface-active compounds, such as anionic, cationic, nonionic and amphoteric surfactants, block polymers, polyelectrolytes, and mixtures thereof. Such surfactants can be used as emulsifier, dispersant, solubilizer, wetter, penetration enhancer, protective colloid, or adjuvant. Examples of surfactants are listed in McCutcheon's, Vol. 1: Emulsifiers & Detergents, McCutcheon's Directories, Glen Rock, USA, 2008 (International Ed. or North American Ed.). Preferred agrochemical compositions for Paenibacillus strains have been described in WO2019/222253 and WO2022/023109.

[0278] Suitable anionic surfactants are alkali, alkaline earth or ammonium salts of sulfonates, sulfates, phosphates, carboxylates, and mixtures thereof. Examples of sulfonates are alkylaryl sulfonates, diphenyl sulfonates, alpha-olefin sulfonates, lignin sulfonates, sulfonates of fatty acids and oils, sulfonates of ethoxylated alkylphenols, sulfonates of alkoxylated arylphenols, sulfonates of condensed naphthalenes, sulfonates of dodecyl- and tridecylbenzenes, sulfonates of naphthalenes and of alkylnaphthalenes, sulfosuccinates, or sulfosuccinamates. Examples of sulfates are sulfates of fatty acids, of oils, of ethoxylated alkylphenols, of alcohols, of ethoxylated alcohols, or of fatty acid esters. Examples of phosphates are phosphate esters. Examples of carboxylates are alkyl carboxylates, and carboxylated alcohol or alkylphenol ethoxylates. Suitable nonionic surfactants are alkoxylates, N-substituted fatty acid amides, amine oxides, esters, sugar-based surfactants, polymeric surfactants, and mixtures thereof. Examples of alkoxylates are compounds such as alcohols, alkylphenols, amines, amides, arylphenols, fatty acids or fatty acid esters which have been alkoxylated with 1 to 50 equivalents. Ethylene oxide and/or propylene oxide may be employed for the alkoxylation, preferably ethylene oxide. Examples of N-substituted fatty acid amides are fatty acid glucamides or fatty acid alkanolamides. Examples of esters are fatty acid esters, glycerol esters, or monoglycerides. Examples of sugar-based surfactants are sorbitans, ethoxylated sorbitans, sucrose and glucose esters, or alkylpolyglucosides. Examples of polymeric surfactants are home- or copolymers of vinyl pyrrolidone, vinyl alcohols, or vinyl acetate.

[0279] Suitable cationic surfactants are quaternary surfactants, for example quaternary ammonium compounds with one or two hydrophobic groups, or salts of long-chain primary amines. Suitable amphoteric surfactants are alkylbetains and imidazolines. Suitable block polymers are block polymers of the A-B or A-B-A type comprising blocks of polyethylene oxide and polypropylene oxide, or of the A-B-C type comprising alkanol, polyethylene oxide, and polypropylene oxide. Suitable polyelectrolytes are polyacids or polybases. Examples of polyacids are alkali salts of polyacrylic acid or polyacid comb polymers. Examples of polybases are polyvinyl amines or polyethylene amines.

[0280] Suitable adjuvants are compounds, which have a negligible or even no pesticidal activity themselves, and which improve the biological performance of the compound I on the target. Examples are surfactants, mineral or vegetable oils, and other auxiliaries. Further examples are listed by Knowles, Adjuvants and additives, Agrow Reports DS256, T&F Informa UK, 2006, chapter 5.

[0281] Suitable thickeners are polysaccharides (e.g. xanthan gum, carboxymethyl cellulose), inorganic clays (organically modified or unmodified), polycarboxylates, and silicates.

[0282] Suitable bactericides are bronopol and isothiazolinone derivatives, such as alkylisothiazolinones and benzisothiazolinones.

[0283] Suitable anti-freezing agents are ethylene glycol, propylene glycol, urea and glycerin.

[0284] Suitable anti-foaming agents are silicones, long chain alcohols, and salts of fatty acids.

[0285] Suitable colorants (e.g. in red, blue, or green) are pigments of low water solubility and water-soluble dyes. Examples are inorganic colorants (e.g. iron oxide, titan oxide, iron hexacyanoferrate) and organic colorants (e.g. alizarin-, azo- and phthalocyanine colorants).

[0286] Suitable tackifiers or binders are polyvinyl pyrrolidones, polyvinyl acetates, polyvinyl alcohols, polyacrylates, biological or synthetic waxes, and cellulose ethers.

[0287] The agrochemical compositions generally comprise between 0.01 and 95%, preferably between 0.1 and 90%, more preferably between 1 and 70%, and in particular between 10 and 60%, by weight of cells or spores of the Paenibacillus strain.

[0288] The amount of these cells or spores is preferably between 5% w/w and 50% w/w, 10% w/w and 50% w/w, 15% w/w and 50% w/w, 30% w/w and 50% w/w, or 40% w/w and 50% w/w, or between 5% w/w and 40% w/w, 10% w/w and 40% w/w, 15% w/w and 40% w/w, 30% w/w and 40% w/w, or between 10% w/w and 40% w/w, 15% w/w and 40% w/w, 30% w/w and 40% w/w of the agrochemical composition.

[0289] The cells or spores of the Paenibacillus strains are usually present in the form of solid particles having an average particle size of 1 to 150 μm, or in an increased order of preference of 1 to 100 μm, 1 to 75 μm, 1 to 50 μm, 1 to 25 μm, 1 to 10 μm, or 1 to 8 μm (determined according to light scattering method in liquid dispersion according to CIPAC method 187).

[0290] The density number of spores per ml can be determined by identifying the number of colony-forming units (CFU) on agar medium e.g. potato dextrose agar after incubation for several days at temperatures of about 20 to about 35° C. The amount of CFU/g of biomass used to prepare agrochemical compositions of the invention are usually between 1×10⁸ CFU/g to 1×10¹¹ CFU/g, or 1×10⁸ CFU/g to 1×10¹⁰ CFU/g, or 5×10⁸ to 5×10¹⁰ CFU/g, preferably between 1×10⁹ CFU/g to 1×10¹⁰ CFU/g. The CFU/g of biomass will influence the amount of biomass which is used to prepare the formulations of the invention. Biomass having a comparatively high amount of CFU/g can be used to prepare formulations having a comparatively low amount of biomass. The amount of biomass used for preparing the formulations of the invention is usually selected to fit the amount of CFU per hectare, which should be applied for the respective purpose.

[0291] For the purposes of treatment of plant propagation materials, particularly seeds, solutions for seed treatment (LS), Suspoemulsions (SE), flowable concentrates (FS), powders for dry treatment (DS), water-dispersible powders for slurry treatment (WS), water-soluble powders (SS), emulsions (ES), emulsifiable concentrates (EC), and gels (GF) are usually employed. The compositions in question give, after two-to-tenfold dilution, active substance concentrations of from 0.01 to 60% by weight, preferably from 0.1 to 40%, in the ready-to-use preparations. Application can be carried out before or during sowing. Methods for applying the mixtures or agrochemical compositions comprising the mixtures, respectively, onto young plants and propagation material like seedlings, rooted/unrooted cuttings, plants derived from cell-culture, include dressing, coating, pelleting, dusting, soaking, as well as in-furrow application methods. Preferably, the mixtures and agrochemical compositions thereof, respectively, are applied on to seeds by a method such that germination is not induced, e.g. by seed dressing, pelleting, coating, and dusting.

[0292] Various types of oils, wetters, adjuvants, fertilizers, or micronutrients, and further pesticides (e. g. fungicides, growth regulators, herbicides, insecticides, safeners) may be added to the mixtures or the agrochemical compositions thereof as premix, or, not until immediately prior to use (tank mix). These agents can be admixed with the mixtures or the agrochemical compositions according to the invention in a weight ratio of 1:100 to 100:1, preferably 1:10 to 10:1.

[0293] The Paenibacillus strains and the agrochemical composition comprising these strains ae usually applied in fungicidally active amounts. The term “fungicidally effective amount” denotes an amount of the composition or of the mixtures, which is sufficient for controlling harmful fungi plants and which does not result in a substantial damage to the treated plants, young plants like seedlings, rooted/unrooted cuttings, plants derived from cell-culture or plant propagation materials, such as seeds. Such an amount can vary in a broad range and is dependent on various factors, such as the fungal species to be controlled, the treated plant species, the climatic conditions and the specific mixture used.

[0294] When the agrochemical compositions are used to be applied as foliar treatment or to the soil, preferably as foliar treatment. The application rates in foliar treatments are usually between 50 g/ha and 2000 g/ha, 100 g/ha and 2000 g/ha, 150 g/ha and 2000 g/ha, 600 g/ha and 2000 g/ha or 800 g/ha and 2000 g/ha or
[0295] between 50 g/ha and 1000 g/ha, 100 g/ha and 1000 g/ha, 150 g/ha and 1000 g/ha, 600 g/ha and 1000 g/ha or 800 g/ha and 1000 g/ha,
[0296] or between 50 g/ha and 800 g/ha, 100 g/ha and 800 g/ha, 150 g/ha and 800 g/ha, 600 g/ha and 800 g/ha or
[0297] between 150 g/ha and 1000 g/ha, 300 g/ha and 1000 g/ha, 600 g/ha and 1000 g/ha of fusaricidin comprising cells or spores in a volume
[0298] between 1000 L/ha and 100 L/ha, 600 L/ha and 100 L/ha, 400 L/ha and 100 L/ha, 200 L/ha and 100 L/ha or
[0299] between 1000 L/ha and 600 L/ha, 1000 L/ha and 400 L/ha or 1000 L/ha and 200 L/ha, or between 600 L/ha and 200 L/ha, 600 L/ha and 400 L/ha of a water based spraying liquid.

[0300] When the agrochemical compositions are employed in seed treatment, for example as seed coating, the application rates with respect to plant propagation material usually range from about 1×10¹ to 1×10¹² (or more) CFU/seed, preferably from about 1×10³ to about 1×10¹⁰ CFU/seed, and even more preferably from about 1×10³ to about 1×10⁶ CFU/seed. Alternatively, the application rates with respect to plant propagation material preferably range from about 1×10⁷ to 1×10¹⁶ (or more) CFU per 100 kg of seed, preferably from 1×10⁹ to about 1×10¹⁵ CFU per 100 kg of seed, even more preferably from 1×10¹¹ to about 1×10¹⁵ CFU per 100 kg of seed.

[0301] The Paenibacillus strains and the agrochemical compositions comprising these strains, respectively, are suitable as fungicides effective against a broad spectrum of phytopathogenic fungi, including soil-borne fungi, in particular from the classes of Plasmodiophoromycetes, Peronosporomycetes (syn. Oomycetes), Chytridiomycetes, Zygomycetes, Ascomycetes, Basidiomycetes, and Deuteromycetes (syn. Fungi imperfecti). They can be used in crop protection as foliar fungicides, fungicides for seed dressing, and soil fungicides.

[0302] The Paenibacillus strains and the agrochemical compositions comprising these strains are preferably useful in the control of phytopathogenic fungi on various cultivated plants, such as cereals, e.g. wheat, rye, barley, triticale, oats, or rice; beet, e.g. sugar beet or fodder beet; fruits, e. g. pomes (apples, pears, etc.), stone fruits (e.g. plums, peaches, almonds, cherries), or soft fruits, also called berries (strawberries, raspberries, blackberries, gooseberries, etc.); leguminous plants, e.g. lentils, peas, alfalfa, or soybeans; oil plants, e.g. oilseed rape, mustard, olives, sunflowers, coconut, cocoa beans, castor oil plants, oil palms, ground nuts, or soybeans; cucurbits, e.g. squashes, cucumber, or melons; fiber plants, e.g. cotton, flax, hemp, or jute; citrus fruits, e.g. oranges, lemons, grapefruits, or mandarins; vegetables, e.g. spinach, lettuce, asparagus, cabbages, carrots, onions, tomatoes, potatoes, cucurbits, or paprika; lauraceous plants, e.g. avocados, cinnamon, or camphor; energy and raw material plants, e.g. corn, soybean, oilseed rape, sugar cane, or oil palm; corn; tobacco; nuts; coffee; tea; bananas; vines (table grapes and grape juice grape vines); hop; turf; sweet leaf (also called Stevia); natural rubber plants; or ornamental and forestry plants, e.g. flowers, shrubs, broad-leaved trees, or evergreens (conifers, eucalypts, etc.); on the plant propagation material, such as seeds; and on the crop material of these plants.

[0303] More preferably, the Paenibacillus strains and the agrochemical compositions comprising these strains are used for controlling fungi on field crops, such as potatoes, sugar beets, tobacco, wheat, rye, barley, oats, rice, corn, cotton, soybeans, oilseed rape, legumes, sunflowers, coffee or sugar cane; fruits; vines; grapes for wine making or fruit grapes, ornamentals; or vegetables, such as cucumbers, tomatoes, pepper, beans or squashes.

[0304] The term “plant propagation material” is to be understood to denote all the generative parts of the plant, such as seeds; and vegetative plant materials, such as cuttings and tubers (e.g. potatoes), which can be used for the multiplication of the plant. This includes seeds, roots, fruits, tubers, bulbs, rhizomes, shoots, sprouts and other parts of plants; including seedlings and young plants to be transplanted after germination or after emergence from soil.

[0305] Accordingly, one embodiment of the invention is plant propagation material comprising the Paenibacillus strains or comprising a coating of an agrochemical composition comprising Paenibacillus strains. Preferably the plant propagation material are young plants, like seedlings, rooted/unrooted cuttings, plants derived from cell-culture. Even more preferred the plant propagation material is from fruit or vegetable plant species, including grapes.

[0306] According to the invention all of the above cultivated plants are understood to comprise all species, subspecies, variants and/or hybrids which belong to the respective cultivated plants. For example, corn is also known as Indian corn or maize (Zea mays) which comprises all kinds of corn such as field corn and sweet corn. According to the invention all maize or corn subspecies and/or varieties are comprised, in particular flour corn (Zea mays var. amylacea), popcorn (Zea mays var. everta), dent corn (Zea mays var. indentata), flint corn (Zea mays var. indurata), sweet corn (Zea mays var. saccharata and var. rugosa), waxy corn (Zea mays var. ceratina), amylomaize (high amylose Zea mays varieties), pod corn or wild maize (Zea mays var. tunicata) and striped maize (Zea mays var. japonica). These subspecies and/or varieties comprise also special growth forms like short stature corn The skilled person knows similar variants of other plant species, like, sweet pepper, determinate or indeterminate soybean, and others.

[0307] Accordingly, the invention provides for methods for controlling, suppressing or preventing fungal infection of plants comprising the steps of
[0308] a) providing a mixture comprising a1) a pure culture of a Paenibacillus species strain of the invention and a2) a pure culture of a microorganism which is sensitive to polymyxin or is sensitive to tridecaptin or is sensitive to polymyxin and tridecaptin or is sensitive to the presence of the parent strain of the Paenibacillus species strain of the invention and
[0309] b) applying an effective amount of a mixture of step a) to the plant pathogenic fungi, their habitat, the host plants, plant propagation material or the soil used to grow the plant.

[0310] Preferably the Paenibacillus species strain a1) and, if applicable the microorganism a2) are applied in the form of spores.

[0311] The Paenibacillus strains and the agrochemical compositions comprising these strains, respectively, are particularly suitable for controlling the following causal agents of plant diseases: Albugo spp. (white rust) on ornamentals, vegetables (e.g. A. candida) and sunflowers (e.g. A. tragopogonis); Alternaria spp. (Alternaria leaf spot) on vegetables (e.g. A. dauci or A. porri), oilseed rape (A. brassicicola or brassicae), sugar beets (A. tenuis), fruits (e.g. A. grandis), rice, soybeans, potatoes and tomatoes (e.g. A. solani, A. grandis or A. alternata), tomatoes (e.g. A. solani or A. alternata) and wheat (e.g. A. triticina); Aphanomyces spp. on sugar beets and vegetables; Ascochyta spp. on cereals and vegetables, e.g. A. tritici (anthracnose) on wheat and A. hordei on barley; Aureobasidium zeae (syn. Kapatiella zeae) on corn; Bipolaris and Drechslera spp. (teleomorph: Cochliobolus spp.), e.g. Southern leaf blight (D. maydis) or Northern leaf blight (B. zeicola) on corn, e.g. spot blotch (B. sorokiniana) on cereals and e.g. B. oryzae on rice and turfs; Blumeria (formerly Erysiphe) graminis (powdery mildew) on cereals (e.g. on wheat or barley); Botrytis cinerea (teleomorph: Botryotinia fuckeliana: grey mold) on fruits and berries (e.g. strawberries), vegetables (e.g. lettuce, carrots, celery and cabbages); B. squamosa or B. allii on onion family), oilseed rape, ornamentals (e.g. B eliptica), vines, forestry plants and wheat; Bremia lactucae (downy mildew) on lettuce; Ceratocystis (syn. Ophiostoma) spp. (rot or wilt) on broad-leaved trees and evergreens, e.g. C. ulmi (Dutch elm disease) on elms; Cercospora spp. (Cercospora leaf spots) on corn (e.g. Gray leaf spot: C. zeae-maydis), rice, sugar beets (e.g. C. beticola), sugar cane, vegetables, coffee, soybeans (e.g. C. sojina or C. kikuchii) and rice; Cladobotryum (syn. Dactylium) spp. (e.g. C. mycophilum (formerly Dactylium dendroides, teleomorph: Nectria albertinii, Nectria rosella syn. Hypomyces rosellus) on mushrooms; Cladosporium spp. on tomatoes (e.g. C. fulvum: leaf mold) and cereals, e.g. C. herbarum (black ear) on wheat; Claviceps purpurea (ergot) on cereals; Cochliobolus (anamorph: Helminthosporium of Bipolaris) spp. (leaf spots) on corn (C. carbonum), cereals (e.g. C. sativus, anamorph: B. sorokiniana) and rice (e.g. C. miyabeanus, anamorph: H. oryzae); Colletotrichum (teleomorph: Glomerella) spp. (anthracnose) on cotton (e.g. C. gossypii), corn (e.g. C. graminicola: Anthracnose stalk rot), soft fruits, potatoes (e.g. C. coccodes: black dot), beans (e.g. C. lindemuthianum), soybeans (e.g. C. truncatum or C. gloeosporioides), vegetables (e.g. C. lagenarium or C. capsici), fruits (e.g. C. acutatum), coffee (e.g. C. coffeanum or C. kahawae) and C. gloeosporioides on various crops; Corticium spp., e.g. C. sasakii (sheath blight) on rice; Corynespora cassiicola (leaf spots) on soybeans, cotton and ornamentals; Cycloconium spp., e.g. C. oleaginum on olive trees; Cylindrocarpon spp. (e.g. fruit tree canker or young vine decline, teleomorph: Nectria or Neonectria spp.) on fruit trees, vines (e.g. C. liriodendri, teleomorph: Neonectria liriodendri: Black Foot Disease) and ornamentals; Dematophora (teleomorph: Rosellinia) necatrix (root and stem rot) on soybeans; Diaporthe spp., e.g. D. phaseolorum (damping off) on soybeans; Drechslera (syn. Helminthosporium, teleomorph: Pyrenophora) spp. on corn, cereals, such as barley (e.g. D. teres, net blotch) and wheat (e.g. D. tritici-repentis: tan spot), rice and turf; Esca (dieback, apoplexy) on vines, caused by Formitiporia (syn. Phellinus) punctata, F. mediterranea, Phaeomoniella chlamydospora (formerly Phaeoacremonium chlamydosporum), Phaeoacremonium aleophilum and/or Botryosphaeria obtusa; Elsinoe spp. on pome fruits (E. pyri), soft fruits (E. veneta: anthracnose) and vines (E. ampelina: anthracnose); Entyloma oryzae (leaf smut) on rice; Epicoccum spp. (black mold) on wheat; Erysiphe spp. (powdery mildew) on sugar beets (E. betae), vegetables (e.g. E. pisi), such as cucurbits (e.g. E. cichoracearum), cabbages, oilseed rape (e.g. E. cruciferarum); Eutypa lata (Eutypa canker or dieback, anamorph: Cytosporina lata, syn. Libertella blepharis) on fruit trees, vines and ornamental woods; Exserohilum (syn. Helminthosporium) spp. on corn (e.g. E. turcicum); Fusarium (teleomorph: Gibberella) spp. (wilt, root or stem rot) on various plants, such as F. graminearum or F. culmorum (root rot, scab or head blight) on cereals (e.g. wheat or barley), F. oxysporum on tomatoes, F. solani (f. sp. glycines now syn. F. virguliforme) and F. tucumaniae and F. brasiliense each causing sudden death syndrome on soybeans, and F. verticillioides on corn; Gaeumannomyces graminis (take-all) on cereals (e.g. wheat or barley) and corn; Gibberella spp. on cereals (e.g. G. zeae) and rice (e.g. G. fujikuroi: Bakanae disease); Glomerella cingulata on vines, pome fruits and other plants and G. gossypii on cotton; Grainstaining complex on rice; Guignardia bidwellii (black rot) on vines; Gymnosporangium spp. on rosaceous plants and junipers, e.g. G. sabinae (rust) on pears; Helminthosporium spp. (syn. Drechslera, teleomorph: Cochliobolus) on corn, cereals, potatoes and rice; Hemileia spp., e.g. H. vastatrix (coffee leaf rust) on coffee; Isariopsis clavispora (syn. Cladosporium vitis) on vines; Macrophomina phaseolina (syn. phaseoli) (root and stem rot) on soybeans and cotton; Microdochium (syn. Fusarium) nivale (pink snow mold) on cereals (e.g. wheat or barley); Microsphaera diffusa (powdery mildew) on soybeans; Monilinia spp., e.g. M. laxa, M. fructicola and M. fructigena (syn. Monilia spp.: bloom and twig blight, brown rot) on stone fruits and other rosaceous plants; Mycosphaerella spp. on cereals, bananas, soft fruits and ground nuts, such as e.g. M. graminicola (anamorph: Zymoseptoria tritici formerly Septoria tritici: Septoria blotch) on wheat or M. fijiensis (syn. Pseudocercospora fijiensis: black Sigatoka disease) and M. musicola on bananas, M. arachidicola (syn. M. arachidis or Cercospora arachidis), M. berkeleyi on peanuts, M. pisi on peas and M. brassiciola on brassicas; Peronospora spp. (downy mildew) on cabbage (e.g. P. brassicae), oilseed rape (e.g. P. parasitica), onions (e.g. P. destructor), tobacco (P. tabacina) and soybeans (e.g. P. manshurica); Phakopsora pachyrhizi and P. meibomiae (soybean rust) on soybeans; Phialophora spp. e.g. on vines (e.g. P. tracheiphila and P. tetraspora) and soybeans (e.g. P. gregata: stem rot); Phoma lingam (syn. Leptosphaeria biglobosa and L. maculans: root and stem rot) on oilseed rape and cabbage, P. betae (root rot, leaf spot and damping-off) on sugar beets and P. zeae-maydis (syn. Phyllostica zeae) on corn; Phomopsis spp. on sunflowers, vines (e.g. P. viticola: can and leaf spot) and soybeans (e.g. stem rot: P. phaseoli, teleomorph: Diaporthe phaseolorum); Physoderma maydis (brown spots) on corn; Phytophthora spp. (wilt, root, leaf, fruit and stem root) on various plants, such as paprika and cucurbits (e.g. P. capsici), soybeans (e.g. P. megasperma, syn. P. sojae), potatoes and tomatoes (e.g. P. infestans: late blight) and broad-leaved trees (e.g. P. ramorum: sudden oak death); Plasmodiophora brassicae (club root) on cabbage, oilseed rape, radish and other plants; Plasmopara spp., e.g. P. viticola (grapevine downy mildew) on vines and P. halstedii on sunflowers; Podosphaera spp. (powdery mildew) on rosaceous plants, hop, pome and soft fruits (e.g. P. leucotricha on apples) and curcurbits (P. xanthii); Polymyxa spp., e.g. on cereals, such as barley and wheat (P. graminis) and sugar beets (P. betae) and thereby transmitted viral diseases; Pseudocercosporella herpotrichoides (syn. Oculimacula yallundae, O. acuformis: eyespot, teleomorph: Tapesia yallundae) on cereals, e.g. wheat or barley; Pseudoperonospora (downy mildew) on various plants, e.g. P. cubensis on cucurbits or P. humili on hop; Pseudopezicula tracheiphila (red fire disease or ‘rotbrenner’, anamorph: Phialophora) on vines; Puccinia spp. (rusts) on various plants, e.g. P. triticina (brown or leaf rust), P. striiformis (stripe or yellow rust), P. hordei (dwarf rust), P. graminis (stem or black rust) or P. recondita (brown or leaf rust) on cereals, such as e.g. wheat, barley or rye, P. kuehnii (orange rust) on sugar cane and P. asparagi on asparagus; Pyrenopeziza spp., e.g. P. brassicae on oilseed rape; Pyrenophora (anamorph: Drechslera) tritici-repentis (tan spot) on wheat or P. teres (net blotch) on barley; Pyricularia spp., e.g. P. oryzae (teleomorph: Magnaporthe grisea: rice blast) on rice and P. grisea on turf and cereals; Pythium spp. (damping-off) on turf, rice, corn, wheat, cotton, oilseed rape, sunflowers, soybeans, sugar beets, vegetables and various other plants (e.g. P. ultimum or P. aphanidermatum) and P. oligandrum on mushrooms; Ramularia spp., e.g. R. collo-cygni (Ramularia leaf spots, Physiological leaf spots) on barley, R. areola (teleomorph: Mycosphaerella areola) on cotton and R. beticola on sugar beets; Rhizoctonia spp. on cotton, rice, potatoes, turf, corn, oilseed rape, potatoes, sugar beets, vegetables and various other plants, e.g. R. solani (root and stem rot) on soybeans, R. solani (sheath blight) on rice or R. cerealis (Rhizoctonia spring blight) on wheat or barley; Rhizopus stolonifer (black mold, soft rot) on strawberries, carrots, cabbage, vines and tomatoes; Rhynchosporium secalis and R. commune (scald) on barley, rye and triticale; Sarocladium oryzae and S. attenuatum (sheath rot) on rice; Sclerotinia spp. (stem rot or white mold) on vegetables (S. minor and S. sclerotiorum) and field crops, such as oilseed rape, sunflowers (e.g. S. sclerotiorum) and soybeans, S. rolfsii (syn. Athelia rolfsii) on soybeans, peanut, vegetables, corn, cereals and ornamentals; Septoria spp. on various plants, e.g. S. glycines (brown spot) on soybeans, S. tritici (syn. Zymoseptoria tritici, Septoria blotch) on wheat and S. (syn. Stagonospora) nodorum (Stagonospora blotch) on cereals; Uncinula (syn. Erysiphe) necator (powdery mildew, anamorph: Oidium tuckeri) on vines; Setosphaeria spp. (leaf blight) on corn (e.g. S. turcicum, syn. Helminthosporium turcicum) and turf; Sphacelotheca spp. (smut) on corn, (e.g. S. reiliana, syn. Ustilago reiliana: head smut), sorghum und sugar cane; Sphaerotheca fuliginea (syn. Podosphaera xanthii: powdery mildew) on cucurbits; Spongospora subterranea (powdery scab) on potatoes and thereby transmitted viral diseases; Stagonospora spp. on cereals, e.g. S. nodorum (Stagonospora blotch, teleomorph: Leptosphaeria [syn. Phaeosphaeria] nodorum, syn. Septoria nodorum) on wheat; Synchytrium endobioticum on potatoes (potato wart disease); Taphrina spp., e.g. T. deformans (leaf curl disease) on peaches and T. pruni (plum pocket) on plums; Thielaviopsis spp. (black root rot) on tobacco, pome fruits, vegetables, soybeans and cotton, e.g. T. basicola (syn. Chalara elegans); Tilletia spp. (common bunt or stinking smut) on cereals, such as e.g. T. tritici (syn. T. caries, wheat bunt) and T. controversa (dwarf bunt) on wheat; Trichoderma harzianum on mushrooms; Typhula incarnata (grey snow mold) on barley or wheat; Urocystis spp., e.g. U. occulta (stem smut) on rye; Uromyces spp. (rust) on vegetables, such as beans (e.g. U. appendiculatus, syn. U. phaseoli), sugar beets (e.g. U. betae or U. beticola) and on pulses (e.g. U. vignae, U. pisi, U. viciae-fabae and U. fabae); Ustilago spp. (loose smut) on cereals (e.g. U. nuda and U. avaenae), corn (e.g. U. maydis: corn smut) and sugar cane; Venturia spp. (scab) on apples (e.g. V. inaequalis) and pears; and Verticillium spp. (wilt) on various plants, such as fruits and ornamentals, vines, soft fruits, vegetables and field crops, e.g. V. longisporum on oilseed rape, V. dahliae on strawberries, oilseed rape, potatoes and tomatoes, and V. fungicola on mushrooms; Zymoseptoria tritici on cereals.

[0312] The Paenibacillus strains and the agrochemical compositions comprising these strains are particularly suitable for controlling the following phytophathogenic fungi genera; Alternaria, Botrytis, Venturia, Leptosphaeria, Fusarium, Rhizoctonia, Phytophthora, Pythium, Colletotrichum, Pyricularia, Sclerotinia, Zymoseptoria.

[0313] The Paenibacillus strains and the agrochemical compositions comprising these strains are particularly suitable for controlling the following phytophathogenic fungi, Alternaria solanum, Alternaria alternata, Alternaria brassicae, Alternaria brassicicola, Alternaria citri, Alternaria mali, Botrytis cinerea, Botrytis allii, Botrytis fabae, Botrytis squamosa, Venturia inaequalis, Venturia effusa, Venturia carpophila, Venturia pyrina, Leptosphaeria maculans, Leptosphaeria nodorum Fusarium oxysporum, Fusarium graminearum, Fusarium verticillioides, Rhizoctonia solani, Phytophthora infestans, Phytophthora capsici, Phytophthora fragariae, Phytophthora nicotianae, Phytophthora sojae, Pythium ultimum, Pythium acanthicum, Pythium deliense, Pythium graminicola, Pythium heterothallicum, Pythium hypogynum, Pythium middletonii Colletotrichum orbiculare, Colletotrichum capsici, Colletotrichum coccodes, Colletotrichum fragariae, Colletotrichum lindemuthianum, Pyricularia oryzae, Sclerotinia sclerotiorum, Sclerotinia minor, Sclerotinia trifoliorum, Zymoseptoria tritici.

[0314] The Paenibacillus strains and the agrochemical compositions comprising these strains are particularly suitable for controlling the following phytophathogenic fungi, Alternaria solanum, Botrytis cinerea, Venturia inaequalis, Leptosphaeria maculans, Leptosphaeria nodorum, Fusarium oxysporum, Fusarium graminearum, Rhizoctonia solani, Phytophthora infestans, Pythium ultimum, Colletotrichum orbiculare, Pyricularia oryzae, Sclerotinia sclerotiorum and Zymoseptoria tritici.

[0315] The Paenibacillus strains and the agrochemical compositions comprising these strains are particularly suitable for controlling the following phytophathogenic fungi, Alternaria solanum, Botrytis cinerea, Leptosphaeria nodorum, Phytophthora infestans, Colletotrichum orbiculare, Pyricularia oryzae, Sclerotinia sclerotiorum and Zymoseptoria tritici.

[0316] The antifungal effect of the Paenibacillus strains and the agrochemical compositions comprising these strains can be enhanced by combining them with fungicides and other biologicals who have shown to have a positive effect with Paenibacillus strains and/or fusaricidins. Such fungicides and biologicals have been disclosed for example in WO2014085576, WO2017/137351, WO2017/137353, WO2020154813, WO2021097162 and WO2022/136003. Further preferred combinations are mixtures of the Paenibacillus strains and other microorganisms as disclosed herein.

[0317] Paenibacillus species strains are known for their capability to promote plant growth, e.g. via production of plant hormones, mobilization of plant nutrients or nitrogen fixation. This effect can be enhanced by combining these Paenibacillus species strains with other microorganisms, which may for example also fix nitrogen or by combining them with fertilizers, similar to the embodiments disclosed in WO2019/155253.

[0318] Accordingly, the invention comprises also a method to enhance plant growth comprising the steps of a) providing a pure culture of a Paenibacillus species strain of the invention or applying an effective amount of a mixture comprising a1) a pure culture of a Paenibacillus species strain of the invention and a2) a pure culture of a microorganism which is sensitive to polymyxin or is sensitive to tridecaptin or is sensitive to polymyxin and tridecaptin or is sensitive to the presence of the parent strain of the Paenibacillus species strain of the invention, and
[0319] b) applying an effective amount of a pure culture of the Paenibacillus species strain of the invention or applying an effective amount of a mixture comprising a1) a pure culture of a Paenibacillus species strain of the invention and a2) a pure culture of a microorganism which is sensitive to polymyxin or is sensitive to tridecaptin or is sensitive to polymyxin and tridecaptin or is sensitive to the presence of the parent strain of the Paenibacillus species strain of the invention, to the plant, plant propagation material or the soil used to grow the plant.

[0320] Another part of the invention is a kit of at least two parts comprising a) a pure culture of a Paenibacillus species strain of the invention in a first concentrated form and b) comprising a pure culture of a microorganism which is sensitive to polymyxin or is sensitive to tridecaptin or is sensitive to polymyxin and tridecaption or is sensitive the presence of the parent strain of the Paenibacillus species strain of the invention in a second concentrated form and comprising c) a set of instructions on how to use a) and b) to prepare a mixture to be used in a method for controlling, suppressing or preventing fungal infection of plants or to be used in a method to enhance plant growth.

[0321] A further part of the invention is plant propagation material comprising a pure culture of a Paenibacillus species strain of the invention or a mixture comprising a1) a pure culture of a microorganism which is sensitive to polymyxin or is sensitive to tridecaptin or is sensitive to polymyxin and tridecaption or is sensitive the presence of the parent strain of the Paenibacillus species strain of the invention.

[0322] A further part of the invention is plant propagation material comprising a whole culture broth, of a Paenibacillus species strain of the invention, a cell-free culture broth of the Paenibacillus species strain of the invention or a cell-free extract of the Paenibacillus species strain of the invention.

[0323] The Paenibacillus species strain of the invention produce less, or no DAB comprising compounds and are therefore especially suited to be used in processes, in which the production of DAB comprising compounds is not intended or even not desirable.

[0324] Such processes are for example the production of valuable product like enzymes used in animal feed, backing, detergents or other industries, like phytases, lipases, proteases, glucanases, xylanases or chitinases.

[0325] Another application of the Paenibacillus species strain of the invention is the production of bacterial spores for technical purposes, like spore display technologies.

[0326] Other valuable products of interest may be exopolysaccharides (EPS) produced by Paenibacillus species strains, like levan, curdlan or paenan. Further valuable products of interest are fusaricidin compounds, antifungal peptides, lanthionines or basic chemicals like 2,3-Butandiol, lactic acid or acetoin.

[0327] Accordingly, another part of the invention are methods for the production of valuable products comprising the steps of a) Paenibacillus species strain of the invention, b) culturing the Paenibacillus species strain of the invention under conditions which allow the production of the valuable product and c) harvesting the valuable product.

[0328] Harvesting the valuable product refers to a process in which the valuable product of interest is separated from the rest of the culture broth and the bacterial biomass produced during the culturing step. Depending on the nature of the product of interest the harvesting step can require further purification steps known in the art which depend on the degree of purification intended e.g., for some applications a simple step resulting in an enhanced concentration of the product of interest will suffice, while for other applications purification steps are added to produce a purified product basically devoid of other compounds.

[0329] The Paenibacillus species strains of the invention produce less or no DAB comprising compounds but regain this capacity if they are supplied with DAB. Thus, the Paenibacillus species strains of the invention can also be used in a method for the production of at least one DAB comprising compound, comprising the steps of a) providing a Paenibacillus species strains of the invention derived from a parent strain which has the capacity to produce the DAB comprising compound of interest, b) culturing the Paenibacillus species strains of the invention under conditions which allow the production of the DAB comprising compound of interest and providing the Paenibacillus species strains of the invention with sufficient amounts of DAB to allow the production of the DAB comprising compound of interest and c) harvesting the DAB comprising compound of interest.

[0330] Exopolysaccharides of bacterial origin have been used in many applications. Many of those applications make use of their capacity to alter rheological properties of liquids. This is for example useful in subterraneous oil and gas extraction, food, feed, cosmetics, and pharmaceutical preparations. In other applications EPS are applied as scaffolds or matrices for example in tissue engineering, drug delivery or in wound dressings.

[0331] Moreover, exopolysaccharides from Paenibacillus sp. were applied as antitumor agent, antioxidant or flocculant e.g., in wastewater treatment, see Hong et al., 2014, Antioxidant and antitumor activities of-glucan-rich exopolysaccharides with different molecular weight from Paenibacillus polymyxa JB115. J. Korean Soc. Appl. Biol. Chem. 57, 105-112, Liu et al., 2009, Production, characterization and antioxidant activities in vitro of exopolysaccharides from endophytic bacterium Paenibacillus polymyxa EJS-3. Carbohydr. Polym., 78, 275-281 and Tang et al., Production, purification and application of polysaccharide-based bioflocculant by Paenibacillus mucilaginosus. Carbohydr. Polym. 2014, 113, 463-470.

[0332] EPS of bacterial origin, like xanthan, succinoglycan or alginate, have also been used in many applications in agriculture e.g., in microencapsulation, in seed coatings, coating of roots, plants and seedlings to prevent desiccation, to improve the aggregation and water-holding capacity of soil, to improve the viability of microorganisms, to increases clinginess and permanence of pesticides or fertilizers, to modify the droplet size of spraying solutions, and to maintain homogeneous agrochemical suspensions. EPS of Paenibacillus are especially suited to be used for agricultural applications, because they have been shown to have useful effects on plants e.g., see Grinev et al., 2020, Isolation, structure, and potential biotechnological applications of the exopolysaccharide from Paenibacillus polymyxa 92, Carbohydrate Polymers, 232, 115780 and Yegorenkova et al. 2021, Effect of exopolysaccharides of Paenibacillus polymyxa rhizobacteria on physiological and morphological variables of wheat seedlings, Journal of Microbiology, 59, 8, 729-735, They also have been shown to induce plant acquired resistance and have antagonizing effects on fungal plant pathogens e.g., see Zhao et al., 2020, Tobacco-acquired resistance induced by an exopolysaccharide of Paenibacillus kribbensis PS04 against bacterial wilt, BIOCONTROL SCIENCE AND TECHNOLOGY, 30, 4, 370-383, and Timmusk et al., 2019, Paenibacillus polymyxa biofilm polysaccharides antagonise Fusarium graminearum. Sci Rep. 2019 Jan. 24; 9(1):662,

[0333] For many of the above-described applications it would be of advantage to use EPS of an Paenibacillus species, which is not burdened with the presence of an unnecessary amount of antimicrobial substances like colistin, tridecaptin M or both and is preferably not burdened with an unnecessary amount of a polymyxin or a tridecaptin or even more preferred any DAB comprising compound.

[0334] Accordingly, another part of the invention are EPS of a Paenibacillus species which do not comprise colistin, tridecaptin M or both and preferably do not comprise a polymyxin or tridecaptin and even more preferred do not comprise any DAB comprising compound.

[0335] The phrase “do not comprise” does not mean that these EPS are absolutely free of the respective DAB comprising compound but means that the content of the DAB comprising compound is in a mass fraction of less than 0.1 mg/kg of EPS, preferably less than 0.01 mg/kg EPS, more preferred less than 1 μg/kg EPS and even more preferred less than 0.1 μg/kg EPS.

[0336] Such exopolysaccharides comprise at least one of curdlan, levan or paenan, preferably they comprise levan or paenan or levan and paenan. and may also comprise at least one of a) remaining DNA of the Paenibacillus species strain used for its production or b) remaining protein of the Paenibacillus species strain used for its production, c) at least one fusaricidin, d) at least one lanthipeptide produced by a Paenibacillus species strain or e) any combination of at least two of a) to d).

[0337] Another part of the invention are compositions for subterraneous oil and gas extraction, compositions for treatment of soils for gardening or agriculture, food, feed, cosmetics, pharmaceutical preparations, scaffolds or matrices for use in tissue engineering or drug delivery or in wound dressings, fertilizers, spraying solutions, agrochemical compositions, in particular agrochemical suspension concentrates and seed coatings, comprising Paenibacillus produced EPS not comprising colistin, tridecaptin M or both and preferably not comprising a polymyxin or tridecaptin and even more preferred not comprising any DAB comprising compound.

[0338] A further part of the invention is the use of Paenibacillus produced EPS not comprising colistin, tridecaptin M or both and preferably not comprising a polymyxin or a tridecaptin and even more preferred not comprising any DAB comprising compound in compositions for the use in subterraneous oil and gas extractions, for treatment of soils in gardening or agriculture, in food, feed, cosmetics, pharmaceutical preparations, scaffolds or matrices for use in tissue engineering or drug delivery or in wound dressings, fertilizers, spraying solutions, agrochemical compositions, in particular agrochemical suspension concentrates and seed coatings

[0339] Another part of the invention are compositions comprising Paenibacillus produced EPS not comprising colistin, tridecaptin M or both and preferably not comprising a polymyxin or tridecaptin and even more preferred not comprising any DAB comprising compound in compositions for the use in subterraneous oil and gas extractions, for treatment of soils in gardening or agriculture, in food, feed, cosmetics, pharmaceutical preparations, scaffolds or matrices for use in tissue engineering or drug delivery or in wound dressings, fertilizers, spraying solutions, agrochemical compositions, in particular agrochemical suspension concentrates and seed coatings, In one embodiment of the invention, the Paenibacillus produced EPS not comprising colistin, tridecaptin M or both and preferably not comprising a polymyxin or a tridecaptin and even more preferred not comprising any DAB comprising compound are used in connection with a microorganism which is sensitive to the presence of colistin, tridecaptin M or both, preferably is sensitive to the presence of at least one polymyxin or at least one tridecaptin and even more preferred is sensitive to the presence of at least one DAB comprising compound. Such microorganisms preferably have a use in agriculture, such as microorganisms having an insecticidal, antifungal, antioomycotal effect or are used to improve the availably of nutrients to a plant, such as microorganisms mobilizing phosphorous or fixing nitrogen.

[0340] Preferred applications of Paenibacillus produced EPS in combination with further microorganisms are the microencapsulation of these microorganism or for enhancing the survival rate of such microorganisms during storage or on seeds or to enhance endosymbiosis of nitrogen fixing bacteria. Examples of such applications using different exopolysaccharides can be found in WO201957958 or in Rodrigues et al, 2015, Rhizobium tropici exopolysaccharides as carriers improve the symbiosis of cowpea-Bradyrhizobium-Paenibacillus, African Journal of Microbiology Research, Vol. 9(37), pp. 2037-2050, Article Number: 2871DA655586.

[0341] Thus, the invention comprises compositions comprising:
[0342] a) Paenibacillus produced EPS not comprising colistin, tridecaptin M or both and preferably not comprising a polymyxin or tridecaptin and even more preferred not comprising any DAB comprising compound and
[0343] b) a pure culture of a microorganism which is not a Paenibacillus species strain.

[0344] Such microorganism is preferably a microorganism which is sensitive to the presence of colistin, tridecaptin M or both and preferably is sensitive to the presence at least one polymyxin or at least one tridecaptin and even more preferred is sensitive to the presence of at least one DAB comprising compound.

[0345] In one embodiment such microorganisms belong to the genus Azotobacter, Azospirillum, Pseudomonas, Burkholderia, Paraburkholderia, Rhizobium, Bradyrhizobium, Sinorhizobium, Mesorhizobium, Bacillus or Streptomyces, preferably they belong to the species and strain described above as potential mixture partners for Paenibacillus strains of the invention.

[0346] The invention also provides a method of exopolysaccharide production, comprising a) growing a microorganism according to the invention, b) optionally separating the microorganism from the exopolysaccharide and c) harvesting the produced exopolysaccharide. Suitable methods of growing a microorganism of the present invention, that is, fermentation methods, are generally known to the person skilled in the art. It is a particular advantage that the improved yield in exopolysaccharides can be achieved according to the invention without fundamental changes in corresponding fermentation processes. Methods to harvest the exopolysaccharides are also well known in the art, see e.g., Donot et al., 2012, Microbial exopolysaccharides: Main examples of synthesis, excretion, genetics and extraction, Carbohydrate Polymers, 87, 2, 951-962 or in CN113480672.

[0347] Separation of the EPS from the cells can be performed via mechanical means like centrifugation.

[0348] The EPS is usually precipitated from the supernatant with a surplus of an organic solvent. In one embodiment the organic solvent is ethanol or acetone having a volume of three or more times the volume of the supernatant.

[0349] The precipitated EPS can again be separated via mechanical means.

[0350] Optionally, the EPS can be purified by means available in the art e.g., with further washing steps, gel filtration or anion-exchange chromatography. The degree of purity of the EPS is usually adapted to the intended purpose. Applications in pharmaceutical or food and feed applications generally require a higher purity of the EPS than applications in agriculture compositions or in combinations with other microorganisms.

[0351] The separation of spores and cells may be supported by the addition of amphiphilic sulfonate and/or an amphiphilic sulfate to support the formation of aggregates, which are more readily separated from the EPS comprising supernatant, e.g. as disclosed in WO2017/151742.

[0352] Accordingly, the invention comprises a method of purifying an exopolysaccharide comprising: a) providing a culture of a Paenibacillus species strain producing an EPS not comprising colistin, tridecaptin M or both and preferably not comprising a polymyxin or a tridecaptin and even more preferred not comprising any DAB comprising compound,
[0353] b) optionally mixing an amphiphilic sulfonate and/or an amphiphilic sulfate with the cell culture to induce the formation of aggregates,
[0354] c) separating the Paenibacillus species strain cells and spores from the culture to generate a supernatant fraction and a pellet fraction,
[0355] d) separating the supernatant fraction from the pellet fraction,
[0356] e) adding an organic solvent, preferably an alcohol or acetone, to the supernatant fraction to precipitate the EPS, and
[0357] f) removing the precipitated EPS from the supernatant fraction.

[0358] The precipitated EPS can then be further purified by methods known in the art to reach the intended degree of purity for the purpose.

[0359] The invention comprises also a method to create a Paenibacillus species strain of the invention. Such a strain can be
[0360] a) a Paenibacillus species strain comprising only one genetic locus comprising at least, in the order of rising preference, 80%, 81%, 82%, 83%, 84%, 85%, 86%, 87%, 88%, 89%, 90%, 91%, 92%, 93%, 94%, 95%, 96%, 97%, 98%, or 99% sequence identity to a polynucleotide sequence of any one of SEQ IN NOs: 222, 223, 224, 225, 413, 414, 415, 416, 417, 418 and not comprising an open reading frame for a diaminobutyrate-2-oxoglutarate-transaminase comprising an amino acid sequence of at least, in the order of rising preference, 80%, 81%, 82%, 83%, 84%, 85%, 86%, 87%, 88%, 89%, 90%, 91%, 92%, 93%, 94%, 95%, 96%, 97%, 98%, or 99% sequence identity to SEQ ID NO: 217, or
[0361] b) a Paenibacillus species strain which does not comprise an open reading frame for a diaminobutyrate-2-oxoglutarate-transaminase comprising an amino acid sequence of at least at least, in the order of rising preference, 90%, 91%, 92%, 93%, 94%, 95%, 96%, 97%, 98%, or 99% sequence identity sequence identity to at least one of SEQ ID NO: 217, 218, 219, 220 or 221, or
[0362] c) a Paenibacillus species strain producing more of at least one glutamine comprising fusaricidin, paeniprolixin or paeniserine than of its respective asparagine comprising counterpart, or
[0363] d) a Paenibacillus species strain producing an EPS not comprising colistin, tridecaptin M or both and preferably not comprising a polymyxin or a tridecaptin and even more preferred not comprising any DAB comprising compound.

[0364] The method comprising the following steps of
[0365] a) providing a Paenibacillus species parent strain comprising an open reading frame for a diaminobutyrate-2-oxoglutarate-transaminase comprising an amino acid sequence of at least at least, in the order of rising preference, 90%, 91%, 92%, 93%, 94%, 95%, 96%, 97%, 98%, or 99% sequence identity sequence identity to at least one of SEQ ID NO: 217, 218, 219, 220 or 221, preferably this strain comprises at least two genomic loci comprising at least, in the order of rising preference, 80%, 81%, 82%, 83%, 84%, 85%, 86%, 87%, 88%, 89%, 90%, 91%, 92%, 93%, 94%, 95%, 96%, 97%, 98%, or 99% sequence identity to a polynucleotide sequence of any one of SEQ IN NOs: 222, 223, 224, 225, 413, 414, 415, 416, 417, 418,
[0366] b) providing a stress to a culture of the Paenibacillus species parent strain,
[0367] c) culturing the Paenibacillus species parent strain of b),
[0368] d) isolating a pure culture of a Paenibacillus species strain not producing colistin, tridecaptin M or both and preferably not comprising a polymyxin or a tridecaptin and even more preferred not comprising any DAB comprising compound.

[0369] The stress applied to the Paenibacillus species parent strain of step b) can any stress in the art that enhances the frequency of recombination in bacterial cells, in one embodiment the stress is a heat shock at 60° C. to 90° C. for about 5 to 40 minutes. In a different embodiment the stress is induced by exposing the Paenibacillus species parent strain to material from a fungus or oomycete. This material can be supernatant of a fungus or oomycete culture, material of dead fungus or oomycete cells or living fungal or oomycete cells.

[0370] In case living fungal or oomycote cells are used in step b) it is advisable to include an effective amount of a substance in the culture medium of step c) to prevent growth of the fungal or oomycote cells. The material is preferably from a filamentous fungus and preferably from a Botrytis species or from an oomycote such as a Phytophthora species. The substance to prevent the growth of the living fungal or oomycote cells is preferably a fungicide having activity against the fungal or oomycote species used in step b).

[0371] The culturing in step c) can be performed on solid or in liquid medium. Preferably step c) comprises several recultivation steps in which single colonies or diluted medium is used for recultivation. Each culture step preferably comprises at least two, preferably three days. Preferably step c) comprises at least three, preferably at least four recultivation steps. Preferably each recultivation step is designed to put additional stress on the growing cells due to limited supply of nutrients.

[0372] Several methods known in the art can be used to isolate and test pure cultures in step d) from cells grown at the, preferably last, recultivation step of step c). One simple method is to plate single colonies in an overlay assay using a bacterial lawn of an indicator strain. The indicator strain is selected from a microorganism being sensitive to the presence of colistin, tridecaptin M or both and preferably sensitive to the presence of at least one polymyxin or at least one tridecaptin and even more preferred sensitive to the presence of at least one DAB comprising compound. Preferably the indicator strain is selected to be sensitive to the presence of at least one DAB comprising compound produced by the Paenibacillus species parent strain of step a). The Paenibacillus species strain of interest in step d) can be isolated by picking a colony of a the Paenibacillus species which does not prevent the growth of the indicator strain used. Preferred indicator strains are E. coli strains or strains of microorganism mentioned herein as mixture partners for a Paenibacillus species strain of the invention.

[0373] While this disclosure contains many specific implementation details, these should not be construed as limitations on the scope of the subject matter or on the scope of what can be claimed, but rather as descriptions of features that can be specific to particular implementations. Certain features that are described in this disclosure in the context of separate implementations can also be implemented, in combination, in a single implementation. Conversely, various features that are described in the context of a single implementation can also be implemented in multiple implementations, separately, or in any suitable sub-combination. Moreover, although previously described features can be described as acting in certain combinations and even initially claimed as such, one or more features from a claimed combination can, in some cases, be excised from the combination, and the claimed combination can be directed to a sub-combination or variation of a sub-combination.

[0374] Particular embodiments of the subject matter have been described. Other implementations, alterations, and permutations of the described implementations are within the scope of the following claims as will be apparent to those skilled in the art.

[0375] Accordingly, the previously described example implementations do not define or constrain this disclosure. Other changes, substitutions, and alterations are also possible without departing from the spirit and scope of this disclosure.

[0376] Exemplary embodiments are:
[0377] 1. A Paenibacillus species strain comprising only one genetic locus comprising at least 80% sequence identity to a polynucleotide sequence of any one of SEQ IN NOs: 222, 223, 224, 225, 413, 414, 415, 416, 417, 418 and not comprising an open reading frame for a diaminobutyrate-2-oxoglutarate-transaminase comprising an amino acid sequence of at least 80% sequence identity to SEQ ID NO: 217.
[0378] 2. A Paenibacillus species strain as described in embodiment 1, not comprising a polynucleotide sequence encoding an amino acid sequence comprising at least 80% sequence identity to SEQ ID NO:1.
[0379] 3. A Paenibacillus species strain as described in embodiments 1 or 2, which does not comprise a continuous genome fragment of, in the order of rising preference, less than 350, 340, 330, 320, 310 or 300 kilobases, which comprises a plurality of open reading frames encoding polypeptide sequences of at least 95% sequence identity
   [0380] e) to the amino acid sequences of SEQ ID NOs: 2, 3, 5, 7, 8, 9, 10, 11, 12, 13, 14, 15, 16, 17, 18, 19, 20, 21, 22, 23, 25, 27, 28, 30, 31, 32, 34, 36, 37, 38, 39, 40, 41, 44, 45, 47, 48, 50, 51, 52, 53, 54, 55, 58, 60, 61, 62, 63, 64, 65, 66, 67, 68, 69, 70, 72, 77, 78, 79, 80, 81, 82, 83, 84, 86, 87, 89, 91, 92, 93, 94, 95, 96, 97, 98, 100, 101, 102, 103, 104, 105, 107, 108, 109, 110, 111, 112, 113, 114, 115, 116, 117, 118, 119, 120, 122, 124, 125, 126, 127, 128, 129, 130, 132, 133, 134, 135, 136, 137, 138, 139, 140, 141, 142, 143, 144, 145, 146, 147, 148, 149, 150, 151, 152, 153, 154, 155, 156, 157, 158, 159, 161, 162, 163, 164, 165, 166, 167, 169, 170, 174, 175, 176, 177, 178, 180, 181, or
   [0381] f) to the amino acid sequences of SEQ ID NOs: 241, 242, 244, 245, 246, 247, 248, 249, 250, 251, 252, 253, 254, 255, 256, 257, 258, 259, 260, 261, 262, 263, 264, 265, 266, 267, 268, 269, 270, 271, 272, 273, 274, 275, 276, 277, 278, 279, 280, 281, 282, 283, 284, 285, 286, 287, 288, 289, 290, 291, 292, 293, 294, 295, 296, 297, 298, 299, 300, 301, 302, 303, 304, 305, 306, 307, 309, 310, 311, 312, 313, 314, 315, 316, 317, 318, 319, 320, 321, 322, 323, 324, 325, 326, 327, 328, 329, 330, 331, 332, 333, 347, 348, 349, 350, 351, 352, 353, 354, 355, 356, 357, 358, 360, 363, 363, 364, 365, 366, 367, 369, 370, 371, 372, 373, 374, 375, 376, 377, 378, 379, 380, 381, 382, 383, 384, 385, 387, 388, 389, 390, 391, 392, 393, 394, 395, 396, 397, 398, 399, 400, 401, 402, 403, 404, 405, 406, 407.
[0382] 4. A Paenibacillus species strain as described in any one of embodiments 1 to 3, being an Paenibacillus polymyxa strain and having an ANI-Value of at least 99.9% to the Paenibacillus polymyxa strain LU17007 deposited as DSM 26970 or to the Paenibacillus polymyxa strain SB3-1.
[0383] 5. A Paenibacillus species strain as described in any one of embodiments 1 to 4 being derived from a parent strain, wherein the parent strain comprises an open reading frame for a diaminobutyrate-2-oxoglutarate_transaminase comprising an amino acid sequence of at least 80% sequence identity to SEQ ID NO: 217 and at least two loci each one comprising at least 80% sequence identity to at least one of the nucleotide sequences of SEQ ID NO: 222, 223, 224, 225, 413, 414, 415, 416, 417 and 418.
[0384] 6. A Paenibacillus species strain as described in any one of embodiments 1 to 5 being derived from a parent strain, wherein the parent strain comprises an open reading frame encoding an amino acid sequence of at least 80% sequence identity to SEQ ID NO: 217 and an open reading frame encoding an amino acid sequence of at least 80% sequence identity to SEQ ID NO: 409, preferably encoded by a polynucleotide sequence of at least 80% sequence identity to SEQ ID NO: 411, and an open reading frame encoding an amino acid sequence of at least 80% sequence identity to SEQ ID NO: 410 preferably encoded by a polynucleotide sequence of at least 80% sequence identity to SEQ ID NO: 412.
[0385] 7. A Paenibacillus species strain not comprising a polynucleotide sequence encoding an amino acid sequence of at least 80% sequence identity to SEQ ID NO: 1 and not comprising an open reading frame for a diaminobutyrate-2-oxoglutarate-transaminase comprising an amino acid sequence of at least 80% identity to SEQ ID NO: 217, derived from a parent strain, wherein the parent strain comprises an open reading frame for a diaminobutyrate-2-oxoglutarate-transaminase comprising an amino acid sequence of at least 80% sequence identity to SEQ ID NO: 217 and at least two loci each one comprising at least 80% sequence identity to at least one of the nucleotide sequences of SEQ ID NO: 222, 223, 224, 225, 413, 414, 415, 416, 417 and 418.
[0386] 8. A Paenibacillus species strain as described in any one of embodiments 5 to 7, wherein the parent strain comprises a continuous genome fragment of, in the order of rising preference, less than 350, 340, 330, 320, 310 or 300 kilobases, which comprises a plurality of open reading frames encoding polypeptide sequences of at least 95% sequence identity
   [0387] g) each one of the amino acid sequences of SEQ ID NOs: 2, 3, 5, 7, 8, 9, 10, 11, 12, 13, 14, 15, 16, 17, 18, 19, 20, 21, 22, 23, 25, 27, 28, 30, 31, 32, 34, 36, 37, 38, 39, 40, 41, 44, 45, 47, 48, 50, 51, 52, 53, 54, 55, 58, 60, 61, 62, 63, 64, 65, 66, 67, 68, 69, 70, 72, 77, 78, 79, 80, 81, 82, 83, 84, 86, 87, 89, 91, 92, 93, 94, 95, 96, 97, 98, 100, 101, 102, 103, 104, 105, 107, 108, 109, 110, 111, 112, 113, 114, 115, 116, 117, 118, 119, 120, 122, 124, 125, 126, 127, 128, 129, 130, 132, 133, 134, 135, 136, 137, 138, 139, 140, 141, 142, 143, 144, 145, 146, 147, 148, 149, 150, 151, 152, 153, 154, 155, 156, 157, 158, 159, 161, 162, 163, 164, 165, 166, 167, 169, 170, 174, 175, 176, 177, 178, 180, 181, or
   [0388] h) each one of the amino acid sequences of SEQ ID NOs: 241, 242, 244, 245, 246, 247, 248, 249, 250, 251, 252, 253, 254, 255, 256, 257, 258, 259, 260, 261, 262, 263, 264, 265, 266, 267, 268, 269, 270, 271, 272, 273, 274, 275, 276, 277, 278, 279, 280, 281, 282, 283, 284, 285, 286, 287, 288, 289, 290, 291, 292, 293, 294, 295, 296, 297, 298, 299, 300, 301, 302, 303, 304, 305, 306, 307, 309, 310, 311, 312, 313, 314, 315, 316, 317, 318, 319, 320, 321, 322, 323, 324, 325, 326, 327, 328, 329, 330, 331, 332, 333, 347, 348, 349, 350, 351, 352, 353, 354, 355, 356, 357, 358, 360, 363, 363, 364, 365, 366, 367, 369, 370, 371, 372, 373, 374, 375, 376, 377, 378, 379, 380, 381, 382, 383, 384, 385, 387, 388, 389, 390, 391, 392, 393, 394, 395, 396, 397, 398, 399, 400, 401, 402, 403, 404, 405, 406, 407.
[0389] 9. A Paenibacillus species strain, preferably a Paenibacillus polymyxa strain, as described in any one of embodiments 5 to 8, wherein the parent strain has an ANI-Value of at least 99% to the Paenibacillus polymyxa strain LU17007 deposited as DSM 26970 or to the Paenibacillus polymyxa strain SB3-1.
[0390] 10. A Paenibacillus species strain as described in embodiment 1 or 7, being any one of the Paenibacillus polymyxa strains of LU20754 deposited as DSM 33970, LU21132 deposited as DSM 33971, LU21514 deposited as DSM 33972, LU21552 deposited as DSM 33973, LU22377 deposited as DSM 33974, LU22378 deposited as DSM 33975, LU22379 deposited as DSM 33976, and LU22381 deposited as DSM 33977.
[0391] 11. A mixture comprising a) a pure culture of a Paenibacillus species strain which does not produce a polymyxin and b) a pure culture of a microorganism which is sensitive to polymyxin.
[0392] 12. A mixture as described in embodiment 11, wherein the Paenibacillus species strain of a) does not produce a polymyxin or a tridecaptin, or does not produce a polymyxin and does not produce a tridecaptin, and the second microorganism of b) is sensitive to a polymyxin or a tridecaptin or is sensitive to a polymyxin and a tridecaptin.
[0393] 13. A mixture as described in embodiment 11 or 12, wherein the microorganism of b) is not sensitive to the presence of the Paenibacillus species strain of a) but is sensitive to the presence of the parent strain of the Paenibacillus species strain of a).
[0394] 14. A mixture comprising a) a pure culture of a Paenibacillus species strain which does not comprise an open reading frame for a diaminobutyrate-2-oxoglutarate-transaminase comprising an amino acid sequence of at least 90% sequence identity to at least one of SEQ ID NO: 217, 218, 219, 220 or 221 and b) a pure culture of a microorganism which is sensitive to at least one of polymyxin, tridecaptin, polypeptin, paenilipoheptin, octapeptin, jolipeptin, gavaserin or saltavalin, preferably is sensitive to at least one of polymyxin, tridecaptin or both.
[0395] 15. A mixture as described in any one of embodiments 11 to 14, wherein the Paenibacillus species strain of a) comprises no or only one locus encoding an amino acid sequence comprising at least 90% sequence identity to SEQ ID NO: 1 and does not produce a polymyxin or a tridecaptin or does not produce a polymyxin or a tridecaptin.
[0396] 16. A mixture as described in any one of embodiments 11 to 15, wherein the parent strain of the Paenibacillus species strain of a) comprises at least one locus encoding an amino acid sequence comprising at least 90% sequence identity to SEQ ID NO: 1 and does produce at least one tridecaptin and does preferably produce at least one polymyxin and at least one tridecaptin.
[0397] 17. A mixture as described in any one of embodiments 11 to 16 comprising a pure culture of a of a microorganism selected from Azotobacter, Azospirillum, Pseudomonas, Paraburkholderia, Rhizobium, Bradyrhizobium, Bacillus or Streptomyces.
[0398] 18. A mixture as described in any one of embodiments 11 to 17 comprising a pure culture of a microorganism selected from: Pseudomonas koreensis, Pseudomonas gessardii, Pseudomonas chlororaphis, Paraburkholderia phytofirmans, Rhizobium phaseoli, Rhizobium radiobacter, Bradyrhizobium japonicum, Bacillus licheniformis, Bacillus subtilis, Bacillus amyloliquefaciens, Bacillus licheniformis, Bacillus mycoides, Bacillus firmus, Bacillus thuringiensis, Bacillus pumilus, Bacillus simplex, Streptomyces griseoviridis and Streptomyces lydicus.
[0399] 19. A mixture as described in any one of embodiments 11 to 18 comprising a pure culture of a microorganism selected from: Pseudomonas koreensis, Paraburkholderia phytofirmans, Rhizobium phaseoli, Rhizobium radiobacter, Bradyrhizobium japonicum, Bacillus licheniformis, Bacillus subtilis, Bacillus velezensis and Streptomyces lydicus.
[0400] 20. A Paenibacillus species strain producing more of at least one glutamine comprising fusaricidin, paeniprolixin or paeniserine than of its respective asparagine comprising counterpart.
[0401] 21. A Paenibacillus species strain as described in embodiment 20, producing at least one of a) to e), wherein a) is producing more fusaricidin LiF04b (Fus B) than fusaricidin LiF04a (Fus A), b) producing more fusaricidin LiF03b than fusaricidin LiF03a, c) producing more fusaricidin LiF05b than fusaricidin LiF05a, d) producing more fusaricidin LiF06b than fusaricidin LiF06a, e) fusaricidin LiF07b than fusaricidin LiF07a.
[0402] 22. A Paenibacillus species strain as described in embodiment 20 or 21, producing more fusaricidin LiF04b (Fus B) than fusaricidin LiF04a (Fus A).
[0403] 23. A Paenibacillus species strain as described in any one of embodiments 20 to 22, comprising at least one of the characteristics described for the Paenibacillus polymyxa strain of claims 1 to 9.
[0404] 24. An agrochemical composition comprising a Paenibacillus species strain as described in any one of embodiments 1 to 10 and/or any one of embodiments 20 to 23 or a mixture as described in any one of embodiments 11 to 19 and an auxiliary.
[0405] 25. A whole culture broth, cell-free culture broth, spores or a cell-free extract of a Paenibacillus species strain as described in any one of embodiments 1 to 10 and/or any one of embodiments 20 to 23.
[0406] 26. A method for controlling, suppressing or preventing fungal infection of plants comprising the steps of a) providing a pure culture of a Paenibacillus species strain as described in any one of embodiments 1 to 10 and/or any one of embodiments 20 to 23, or a mixture as described in any one of embodiments 11 to 19, an agrochemical composition as described in embodiment 24 or a whole culture broth, a cell-free culture broth or a cell-free extract as described in embodiment 25 and b) applying an effective amount of the providing a pure culture of a Paenibacillus species strain as described in any one of embodiments 1 to 10 and/or any one of embodiments 20 to 23, or a mixture as described in any one of embodiments 11 to 19, an agrochemical composition as described in embodiment 24 or a whole culture broth, a cell-free culture broth or a cell-free extract as described in embodiment 25 to the plant pathogenic fungi, their habitat, the host plants, plant propagation material or the soil used to grow the plant.
[0407] 27. A method to enhance plant growth comprising the steps of a) providing a pure culture of a Paenibacillus species strain as described in any one of embodiments 1 to 10 and/or any one of embodiments 20 to 23, or a mixture as described in any one of embodiments 11 to 19 or an agrochemical composition as described in embodiment 24 or a whole culture broth, a cell-free culture broth or a cell-free extract as described in embodiment 25 and b) applying an effective amount of the pure culture of a Paenibacillus species strain as described in any one of embodiments 1 to 10 and/or any one of embodiments 20 to 23, or a mixture as described in any one of embodiments 11 to 19 or an agrochemical composition as described in embodiment 24 or a whole culture broth, a cell-free culture broth or a cell-free extract as described in embodiment 25 to the plant, plant propagation material or the soil used to grow the plant.
[0408] 28. A kit of at least two parts comprising a) a pure culture of a Paenibacillus species strain as described in any one of embodiments 1 to 10 and/or any one of embodiments 20 to 23 in a first concentrated form and b) comprising a pure culture of a microorganism as described in any one of embodiments 11 to 19 in a second concentrated form and comprising c) a set of instructions on how to use a) and b) to prepare a mixture as described in any one of embodiments 11 to 19 to be used in a method as described in any one of embodiments 26 or 27.
[0409] 29. An isolated Paenibacillus exopolysaccharide which does not comprise colistin, tridecaptin M or both and preferably do not comprise a polymyxin or tridecaptin and even more preferred do not comprise any DAB comprising compound.
[0410] 30. An isolated Paenibacillus exopolysaccharide as described in embodiment 29, produced by a Paenibacillus strain as described in any one of embodiments 1 to 10 and/or any one of embodiments 20 to 23.
[0411] 31. A composition comprising an isolated Paenibacillus exopolysaccharide as described in embodiment 29 or 30 and comprising at least one of a) an auxiliary, b) a pure culture of microorganism which is sensitive to the presence of colistin, tridecaptin M or both, preferably is sensitive to the presence of at least one polymyxin or at least one tridecaptin and even more preferred is sensitive to the presence of at least one DAB comprising compound, or c) a fertilizer.
[0412] 32. A plant propagation material comprising a pure culture of a Paenibacillus species as described in any one of embodiments 1 to 10 and/or any one of embodiments 20 to 23, or a mixture as described in any one of embodiments 11 to 19 or an agrochemical composition as described in embodiment 24 or a whole culture broth, a cell-free culture broth or a cell-free extract as described in embodiment 25, or isolated Paenibacillus exopolysaccharide as described in embodiment 29 or 30, or a composition as described in embodiment 31.
[0413] 33. A method of production of a valuable product comprising, a) culturing a Paenibacillus species strain as described in any one of embodiments 1 to 10 and/or any one of embodiments 20 to 23, and b) harvesting the valuable product.
[0414] 34. A method as described in embodiment 33, wherein the valuable product is a) an enzyme or a protein, b) an antifungal compound, c) an exopolysaccharide, d) one or more DAB comprising compounds or e) 2,3-Butanediol, lactic acid or acetoin.
[0415] 35. Use of a Paenibacillus species strain as described in any one of embodiments 1 to 10 and/or any one of embodiments 20 to 23 in a mixture as described in any one of embodiments 11 to 19, in a kit of parts as described in embodiment 28, on a plant propagation material or in a method as described in any one of embodiments 26, 27, 33 or 34.
[0416] 36. Use of mixture as described in any one of embodiments 11 to 19 in a method as described in embodiment 26 or 27.
[0417] 37. Use of an isolated Paenibacillus exopolysaccharide as described in embodiment 29 or 30 or a composition as described in embodiment 31 in a method as described in embodiment 26 or 27.
[0418] 38. Use of an isolated Paenibacillus exopolysaccharide as described in embodiment 29 or 30 to prepare a cosmetic composition, a food or feed additive, a pharmaceutical or cosmetic composition, a pharmaceutical or cosmetic carrier, skin hydration composition, a flocculant, an antitumor agent, or as an antioxidant.
[0419] 39. A method to create a Paenibacillus species strain as described in any one of embodiments 1 to 10 and/or any one of embodiments 20 to 23, comprising the following steps of a) providing a Paenibacillus species parent strain as described in any one of embodiments 5 to 9, b) providing stress to a culture of the Paenibacillus species parent strain of a), c) culturing the stressed Paenibacillus species parent strain of b) and d) isolating a pure culture of a Paenibacillus species strain not producing colistin, tridecaptin M or both and preferably not comprising a polymyxin or a tridecaptin and even more preferred not comprising any DAB comprising compound.

### DEPOSIT INFORMATION

[0420] Samples of the Paenibacillus sp. strains of the invention have been deposited by BASF SE (Germany) under the Budapest Treaty with the Deutsche Sammlung von Mikroorganismen und Zellkulturen (DSMZ):
[0421] 1) Paenibacillus strain Lu17007 deposited under Acc. No. DSM 26970 on Feb. 20, 2013
[0422] 2) Paenibacillus strain Lu20754 deposited under Acc. No. DSM 33970 on Jul. 16, 2021
[0423] 3) Paenibacillus strain Lu21132 deposited under Acc. No. DSM 33971 on Jul. 16, 2021
[0424] 4) Paenibacillus strain Lu21514 deposited under Acc. No. DSM 33972 on Jul. 16, 2021
[0425] 5) Paenibacillus strain LU21552 deposited under Acc. No. DSM 33973 on Jul. 16 2021
[0426] 6) Paenibacillus strain LU22377 deposited under Acc. No. DSM 33974 on Jul. 16 2021
[0427] 7) Paenibacillus strain LU22378 deposited under Acc. No. DSM 33975 on Jul. 16, 2021
[0428] 8) Paenibacillus strain LU22379 deposited under Acc. No. DSM 33976 on Jul. 16 2021
[0429] 9) Paenibacillus strain LU22381 deposited under Acc. No. DSM 33977 on Jul. 16, 2021 Strains Lu20754, Lu21132, Lu21514, LU21552, LU22377, LU22378, LU22379 and LU22381 have been developed using strain Lu17007 as direct or indirect parent strain.

[0430] The Paenibacillus sp. strains have been deposited under conditions that assure that access to the culture will be available during the pendency of this patent application to one determined by the Commissioner of Patents and Trademarks to be entitled thereto under 37 C.F.R. § 1.14 and 35 U.S.C. § 122. However, it should be understood that the availability of a deposit does not constitute a license to practice the subject invention in derogation of patent rights granted by governmental action. The deposits have been made merely as a convenience for those of skill in the art and are not an admission that a deposit is required under 35 U.S.C. § 112.

### EXAMPLES

### Strains Used in the Examples

TABLE 4
Paenibacillus strains

| | Strain | | | Alternative |
|---|---|---|---|---|
| Strain | Identifier | Date of isolation | Origin | identifiers |
| Paenibacillus | LU17007 | 1 May 1996 | Germany, Tübingen, Wild- | DSM26970 |
| polymyxa | | | type isolate from soil | |
| Paenibacillus | LU21552 | Mutant generated in | Mutant successor of | — |
| polymyxa | | 2019 | LU17007 (NTG/UV | |
| | | | mutagenesis) | |
| Paenibacillus | DSM365 | before 22 August 1990, | Germany | — |
| polymyxa | | Isolate from garden- | Göttingen | |
| | | soil | | |

TABLE 5
other strains:

| | Strain | Date of | | Alternative |
|---|---|---|---|---|
| Strain | Identifier | isolation | Origin | identifiers |
| Rhizobium phaseoli | DSM30137 | before | country of origin | ATCC 14482, |
| | | 22 August 1990 | unknown | JCM 20683, |
| | | | | NRRL L-321, |
| | | | | VKM B-1966, |
| | | | | NBRC 14785 |
| Pseudomonas koreensis | IA- | 2016 | USA, isolated from | |
| | 250_TP_15 | | corn stalks | |
| Paraburkholderia phytofirmans | DSM17436 | before | Canada; isolated | LMG 22146, |
| | | 5 July 2005 | from surface- | CCUG 49060 |
| | | | sterilized onion roots | |
| Rhizobium radiobacter | DSM30205 | before | country of origin | ATCC 23308, |
| | | 22 August 1990 | unknown; isolated | CCM 1040, |
| | | | from | CIP B6, DSM |
| | | | Malus sp., crown | 60574, ICPBTT 3, |
| | | | gall of apple | NCPPB 397, |
| | | | seedling | NBRC |
| | | | | 102589 |
| Bradyrhizobium japonicum | 532C | 1960 | USA | SEMIA 5039, |
| | | | | 61A152 |
| Bacillus licheniformis | DSM13 | before | country of origin | ATCC 14580, |
| | | 21 August 1990 | unknown | CCM 2145, |
| | | | | IFO 12200, |
| | | | | NCIB 9375, |
| | | | | NCTC 10341, |
| | | | | NBRC 12200, |
| | | | | WDCM 00068 |
| Streptomyces lydicus | WYEC 108 | unkown | From market product | — |
| | | | Actinovate ® SP | |
| Bacillus subtilis | BU1814 | 2004 by | country of origin: | — |
| | | University | USA, Colorado | |
| | | of Delaware | | |
| Bacillus velezensis | MBI600 | 1988 by | country of origin: | — |
| | | Nottingham | GB, Nottinghamshire | |
| | | University | | |

### Example 1 Mutant Generation

[0431] In order to abolish the production of antibiotics, such as polymyxin, from P. polymyxa LU17007, cells (7 E+10 CFU/mL) of this strain were exposed to N-methyl-N′-nitro-N-nitrosoguanidine (NTG) at a concentration of 400 μg/mL for 15 min. Mutants were initially screened for absence of inhibiting substances by overlaying single colonies with a top agar culture of Escherichia co/i which is known to be polymyxin-sensitive, followed by monitoring of inhibition zones, see FIG. 1. Mutant colonies of P. polymyxa, that did not inhibit growth of E. co/i on the agar plate were then cultivated in a soy-based liquid culture medium. Absence of polymyxin production in the culture broth was confirmed by LC-MS.

[0432] Besides using mutagenic agents, it was surprisingly found that environmental stress such as heat exposure or the presence of a fungus can also trigger a loss of polymyxin and tridecaptin production in Paenibacillus strains.

[0433] For the heat shock, 2 ml of a Paenibacillus LU20754 culture broth sample consisting of spores, endospores and viable cells derived from a 48h fermentation in soy-based medium was heated at 60° C. for 30 min. After this pretreatment, the culture sample was used for inoculation of a shake flask with soy-based medium. Cultivation took place for 72h (33° C., 250 ml shake flask with baffles, 40 ml filling volume, 150 rpm at 2.5 cm throw, pH 6.5±0.2). To investigate potential genetic changes compared to a parallel culture without heat shock, DNA extraction and sequencing was carried out. For this, the shake flask culture broths were used for inoculation of 12 ml Greiner tubes filled with 9 ml LB-medium to maintain a fresh culture before DNA extraction. The latter was done after 12h of cultivation using the Genomic tip Kit (Qiagen, Hilden, Germany) following manufacturer's instructions. DNA quality was assessed using agarose gel electrophoresis and DNA concentration was measured using Qubit 4 fluorometer (Thermo Fisher Scientific, Waltham, MA, USA), before DNA was sent for sequencing.

[0434] As an alternative external stressor, Paenibacillus LU20754 was also put into confrontation with fungal material. For this, the phytopathogenic strain Alternaria alternata was grown in liquid culture for 140h using a 1 L shake flask with baffles, 150 ml MEP medium (30 g/L malt-extract, 5 g/L mycological peptone, pH 5.4±0.2) at 23° C., 250 rpm/2.5 cm throw. Then, the fungal culture was pelleted by centrifugation at 13.000 g for 20 min. After resuspension in 40 ml water, sample was put in a homogenization device. To kill surviving fungal material, the sample was then placed in a ultrasonication bath for 60 min followed by an exposure to UV-light for >60 min. Afterwards, the fungal material was centrifuged again at 13.000 g for 20 min and the supernatant was discarded. The remaining pellet was lyophilized by freeze drying to obtain powdery material and stored at 4° C.

[0435] From this devitalized Alternaria cell powder, 2 g/L were added in a liquid culture of Paenibacillus LU20754. Cultivation of Paenibacillus took place for 72h in soy-based medium. DNA extraction for sequencing was carried out as described above.

### Example 2: Sequencing of Polymyxin Negative Candidates of LU17007 from Mutagenesis or Heat and Fungal Exposure

[0436] In order to identify genetic changes that may cause the inability of polymyxin synthesis of the mutant successors of wt strain P. polymyxa LU17007, whole genome sequencing was carried out for 20 individual strains. These strains showed no inhibiting zone in agar-based confrontation assays against the Gram-negative strain E. coli and revealed no polymyxin signals in LCMS analyses. In addition, candidate strains from the heat exposure or fungal confrontation were sent to sequencing. PacBio or Illumina sequencing technology was applied.

### PacBio Sequencing Parameters

[0437] For in-depth genetic analyses, Pacific Bioscience (PacBio) sequencing was performed exemplary with Paenibacillus culture broth samples obtained from the different stressing conditions as described before. Hence, an average of 360 thousand reads were sequenced per sample. Raw fastq sequencing data files were assembled using canu version 1.8 with parameters genomeSize=5.5m, corOutCoverage=60. This mostly resulted in two-contig genomes (a full chromosome and a short, ˜1 kb unplaced contig) with around 338× genome coverage after re-mapping. Genome annotations were carried over from the manually curated LU17007 genome annotations with a custom script. Biosynthetic gene clusters were annotated with antiSMASH 5.1.2 (Blin et al, 2019, antiSMASH 5.0: updates to the secondary metabolite genome mining pipeline, Nucleic Acids Research, Volume 47, Issue W1, Pages W81-W87, https://doi.org/10.1093/nar/gkz310).

### Illumina Sequencing Parameters

[0438] Sequencing of further 20 polymyxin-negative mutant successors of strain LU17007 was performed using Illumina Hi-Seq or Illumina MiniSeq. Between 1.5 and 7 Mio paired-end reads were sequenced per sample. The reads were preprocessed with Trimmomatic version 0.36 (Bolger et al, 2014, Trimmomatic: a flexible trimmer for Illumina sequence data. Bioinformatics 30(15), 2114-2120. https://doi.org/10.1093/bioinformatics/btu170): Clipping adapter sequences (settings: seed mismatches=2, palindrome clip threshold=30, simple clip threshold=10, min adapter length=5), Clipping leading and trailing bases with a quality below 21, Clipping before any stretch of 3 bases with an average quality below 20, Removing any read that, after the clipping steps, is shorter than 30 bp. Remaining read pairs with suitable overlap (minimum overlap of 25, maximum mismatch density of 0.1, maximum overlap of 150) were merged with FLASH v1.2.11 (Mago6 T, Salzberg SL, 2011, FLASH: fast length adjustment of short reads to improve genome assemblies. Bioinformatics. 1; 27(21):2957-63. doi: 10.1093/bioinformatics/btr507. Epub 2011 Sep. 7. PMID: 21903629; PMCID: PMC3198573). The genomes were assembled with SPAdes v3.13.0 (Nurk, et al, 2013, Assembling single-cell genomes and mini-metagenomes from chimeric MDA products. Journal of computational biology: a journal of computational molecular cell biology, 20(10), 714-737. https://doi.org/10.1089/cmb.2013.0084) using the high quality LU20754 PacBio assembly as reference. The assembled scaffolds were filtered with a custom script to remove scaffolds and contigs shorter than 500 bp, as well as PhiX sequencing control contig. Genome annotations were carried over from the manually curated LU17007 genome annotations with a custom script. Biosynthetic gene clusters were annotated with antiSMASH 5.1.2.

### Example 3: Mutation Analysis

[0439] Illumina reads were mapped to reference with BWA-MEM v0.7.17 (Heng Li, Richard Durbin, Fast and accurate long-read alignment with Burrows-Wheeler transform, Bioinformatics, Volume 26, Issue 5, 1 Mar. 2010, Pages 589-595). Indels and single nucleotide polymorphisms (SNPs) were called using the Genome Analysis Toolkit Lite (GATK) v2.3.9, with UnifiedGenotyper (McKenna A, Hanna M, Banks E, Sivachenko A, Cibulskis K, Kernytsky A, Garimella K, Altshuler D, Gabriel S, Daly M, DePristo M A. The Genome Analysis Toolkit: a MapReduce framework for analyzing next-generation DNA sequencing data. Genome Res. 2010 September; 20(9):1297-303. doi: 10.1101/gr.107524.110. Epub 2010 Jul. 19) with options ‘-glm both -mbq 25 -minIndelFrac 0.8’. The reference genome for genotyping was the ancestral strain LU17007.

### Example 4: Comparative Genomics

[0440] To investigate the cause of the inability of polymyxin synthesis in all pmx− strains, in-depth mutation analyses and comparative genomics were conducted. Surprisingly, mutation analyses based on the whole-genome data of each mutant strain did not show any non-silent mutation in the polymyxin gene cluster, its affiliated regulators or any other known genes involved in the polymyxin synthesis such as pmxA, pmxB, pmxC, pmxD, pmxE, spo0A, abrB, sfp. Also, genes for the supply and synthesis of polymyxin precursors and functional groups such as the amino acids L-Threonine, L-Leucine, D-Leucine, L-Aspartate semialdehyde or fatty acids (Yu Z, Qin W, Lin J, Fang S, Qiu J. Antibacterial mechanisms of polymyxin and bacterial resistance. Biomed Res Int. 2015; 2015:679109. doi: 10.1155/2015/679109. Epub 2015 Jan. 15) were not affected by non-silent or disruptive mutations.

[0441] However, comparative genomics of pmx− vs. pmx+ strains revealed that all of the 20 polymyxin negative strains had a roughly 289 kb smaller genome compared to the polymyxin producing strain LU17007. This was identified by mapping the reads of all mutant strain Illumina read bins onto the existing high-quality Pacbio assembly.

[0442] Analysis of the polymyxin negative strains showed that all of them were lacking a total of 147 coding sequences that are consecutively present on a single genome fragment in the wild-type strain. Here, many of these genes were only present as single copy in the early generation P. polymyxa LU17007.

[0443] One of these single copy genes included the diaminobutyrate-2-oxoglutarate transaminase gene ectB, necessary for L-2,4 diaminobutanoate (L-Dab) synthesis, which makes up six of the ten amino acid residues in polymyxin (Yu Z, Qin W, Lin J, Fang S, Qiu J. Antibacterial mechanisms of polymyxin and bacterial resistance. Biomed Res Int. 2015; 2015:679109. doi: 10.1155/2015/679109. Epub 2015 Jan. 15). It was hypothesized the inability to produce polymyxin by the mutant strains containing the smaller genome is due to the missing ectB gene and thus inability to produce Dab necessary for a functional polymyxin. This also explains why although the polymyxin gene cluster is intact and even transcribed in those strains, no polymyxin could be measured. Dab is also present in the antibiotic tridecaptin, suggesting that all mutant strains lacking the ectB gene did not only lose the ability to synthesize polymyxin, but also tridecaptin.

[0444] Based on the genome of the wt strain LU17007, AntiSMASH analyses revealed two NRPS clusters that show high similarity to the tridecaptin (lipopeptide antibiotic against gram-negative bacteria) synthase from Paenibacillus strain M-1. Remarkably, these tridecaptin clusters were found to be highly homologous and only present in the wt strain LU17007. Both clusters are surrounding the fragment carrying 147 genes that was lost in the polymyxin negative mutants of LU17007. Due to their high similarity (˜92% nt similarity) a recombination of both flanking clusters followed by a loss of the 289 kb genomic fragment in between was identified as a highly probable explanation since the mutant strains only showed a single tridecaptin cluster with a mixed sequence consisting of both tridecaptin clusters from the wildtype.

### Example 5: Inhibition Assay

[0445] In order to investigate whether the Paenibacillus mutants or the wild-type parent strain showed any inhibiting effect on growth of different Gram-positive and Gram-negative bacteria, an agar-based co-cultivation assay was performed.

[0446] Bacterial strains from Table 5 were transferred into 250 ml shake flasks containing 30 ml NB medium. Liquid cultivation was performed for 23 h at 30° C. and 250 rpm/2.5 cm throw. From this, 200 μL culture broth was spread on square NB agar plates and evenly distributed on the whole plate.

[0447] Paenibacillus strains from Table 7 were cultivated in 250 ml shake flask with 30 ml NB medium at 33° C. and 250 rpm/2.5 cm throw. After 32h cultivation, 2 ml of each liquid culture was transferred in a snap cap tube and was centrifugated for 1 min at 16.000 g. Then, supernatant was transferred through a 0.2 μm filter membrane in a fresh snap cap vial (=supernatant sample). In parallel, the remaining cell pellet was resuspended in 2 ml of a sterile 0.9% NaCl solution. After redissolving the cell pellet by gently mixing, the cell sample was further diluted 1:10 using 0.9% NaCl (=cell sample).

[0448] From this, 10 μL of each Paenibacillus supernatant or viable cell sample, respectively, were dropped on NB agar plates containing a culture from Table 6.

[0449] Cultivation of these agar plates was carried out for at least 72 days at 30° C. Microbial growth and formation of inhibition zones around the Paenibacillus culture or supernatant spots was assessed visually every day. The results were listed in Table 8.

TABLE 6
Bacterial strains used for detection of inhibiting
effects of Paenibacillus strains

| Strain | Strain Identifier | Gram staining |
|---|---|---|
| Rhizobium phaseoli | DSM30137 | negative |
| Pseudomonas koreensis | (IA-250_TP_15) | negative |
| Paraburkholderia phytofirmans | DSM17436 | negative |
| Rhizobium radiobacter | DSM30205 | negative |
| Bradyrhizobium japonicum | 532C | negative |
| Bacillus licheniformis | DSM13 | positive |
| Streptomyces lydicus | WYEC 108 | positive |
| Bacillus subtilis | BU1814 | positive |
| Bacillus velezensis | MBI600 | positive |

TABLE 7
Paenibacillus strains to test antimicrobial production

| | Strain | |
|---|---|---|
| Strain | Identifier | Origin |
| Paenibacillus polymyxa | LU17007 | Wild-type isolate from soil |
| Paenibacillus polymyxa | LU21552 | Mutant successor of |
| | | LU17007 (NTG/UV mutagenesis) |
| | | with recombination event |
| Paenibacillus polymyxa | DSM365 | DSMZ Leipzig, Germany. |
| | | Isolate from garden-soil |

TABLE 8
Results from the agar-based co-cultivation assay using Paenibacillus
strains combined with bacteria from other genera. Inhibition
of growth by the respective Paenibacillus strain is indicated
by “+”, whereas “−” means no repression of
growth of the listed bacterial strains by Paenibacillus.

| | Growth inhibition zone by Paenibacillus | | |
|---|---|---|---|
| Bacterial strain | LU17007 | DSM365 | LU21552 |
| Strain | (wt) | (wt) | (mutant) |
| Rhizobium phaseoli | + | + | − |
| DSM30137 | | | |
| Pseudomonas koreensis | + | + | − |
| (IA-250_TP_15) | | | |
| Paraburkholderia | + | + | − |
| phytofirmans | | | |
| DSM17436 | | | |
| Rhizobium radiobacter | + | + | − |
| DSM30205 | | | |
| Bradyrhizobium japonicum | + | + | − |
| Bacillus licheniformis | + | + | − |
| DSM13 | | | |
| Streptomyces lydicus | + | + | − |
| WYEC 108 | | | |
| B. subtilis | + | + | − |
| BU1814 | | | |
| B. velezensis | + | + | − |
| MBI600 | | | |

### Example 6: Analyses of Fusaricidins

[0450] To compare share of different Fusaricidins produced during cultivation, Paenibacillus strains from Table 9 were used for analyses via LC-MS. For sample generation, strains were cultivated for 72 h at 30° C. in glucose-starch-CaCO3 (GSC) medium as previously applied from Eliasson Lantz A, Jørgensen P, Poulsen E, Lindemann C, Oisson L. Determination of cell mass and polymyxin using multi-wavelength fluorescence. J Biotechnol. 2006 Feb. 24; 121(4):544-54. doi: 10.10161j.jbiotec.2005.08.007. Epub 2005 Sep. 12. and Niu B, Vater J, Rueckert C, Blom J, Lehmann M, Ru J J, Chen X H, Wang Q, Borriss R. Polymyxin P is the active principle in suppressing phytopathogenic Erwinia spp. by the biocontrol rhizobacterium Paenibacillus polymyxa M-1. BMC Microbiol. 2013 Jun. 18,13:137. doi: 10.1186/1471-2180-13-137. for antimicrobial substance analyses in Paenibacillus polymyxa strain POL4-2 (Alpharma ApS) and strain M-1, respectively. Cultivation took place at 150 rpm using 250 ml shake flask w/o baffles, containing 40 ml GSC medium as listed in Table 10.

TABLE 9
Strains used for LC-MS analyses of Fusaricidins

| | | Recombination of tridecaptin |
|---|---|---|
| Strain | Strain Identifier | clusters/lack of ectB |
| Paenibacillus polymyxa | LU17007 | No |
| Paenibacillus polymyxa | LU22381 | Yes |
| Paenibacillus polymyxa | LU21552 | Yes |

TABLE 10
composition of glucose-starch-CaCO3 (GSC) medium used for analyses
of fusaricidins in Paenibacillus strains from Table 9

| Compound | Amount (g/L) |
|---|---|
| Glucose | 20 |
| Starch | 20 |
| (NH₄)₂SO₄ | 20 |
| Yeast extract | 10 |
| K₂HPO₄ | 2.6 |
| FeSO₄•7H₂O | 0.1 |
| MgSO₄•7H₂O | 0.5 |
| NaCl | 0.25 |
| CaCO₃ | 9 |

### Sample Preparation for LC-hrMS:

[0451] After 72h cultivation time, culture broths of the strains from Table 9 were first centrifuged for 10 min at 20000×g. Obtained supernatants were separated and diluted 1:1 with acetonitrile/water (50:50, v/v) containing 0.1% formic acid (v/v). Resulting precipitation was separated by repeated centrifugation, and supernatants used for LC-hr MS analysis.

### LC-hrMS Methods

[0452] All measurements of these crude extracts were performed on a Thermo Vanquish Flex comprising a high-pressure gradient pump with a 150 μl mixing chamber. The method was based on separations with a BEH C18, 150×2.1 mm, 1.7 μm dp column (Waters, Eschborn, Germany). Two μl sample was separated by a multi-step linear gradient from (A) H2O+0.1% FA to (B) ACN+0.1% FA at a flow rate of 500 μL/min and 65° C. The gradient was initiated by a 5.0 min isocratic step at 15% B, followed by an increase to 50% B in 18 min, followed by a second increase to 98% B in 3 min to end up with a 5 min step at 98% B before re-equilibrations under the initial conditions. UV spectra were recorded by a DAD in the range from 200 to 600 nm with 2 nm width. The LC flow was splitted to 75 μL/min before entering the maXis II hr-ToF mass spectrometer (Bruker Daltonics, Germany) using the Apollo ESI source.

[0453] The ion source parameters were: capillary, 4000 V; endplate offset, 500 V; nebulizer, 1 bar; dry gas, 5 L/min; dry gas temperature, 200° C. Ion transfer parameters were: funnelRF, 400 Vpp; multipoleRF, 350 Vpp; quadrupole ion energy, 3.0 eV @ low m/z 150. Collision cell is set to 8 eV with a stepping collisionRF from 200 to 1200 Vpp and stepping transfer time from 50 to 100 μs with a timing ratio of 30 to 70%; pre puls storage, 7.0 μs in full scan mode. Mass spectra were acquired in positive auto MS/MS mode with selected precursor list ranging from 50-1500 m/z at a 10 Hz scan rate. Selected precursor list was created based on the theoretical masses of the expected m/z values of the fusaricidin derivatives. Each measurement started with the injection of a 20 μL plug of basic sodium formate solution, which is introduced by a loop that is

The application's sequence listing, which the Patent Office published only in electronic form, follows.

SEQUENCE LISTING (418 sequences)

SEQ ID NO: 1 - protein, 1649 aa, Paenibacillus polymyxa
  REGION 1..1649: note = strain LU17007
EQMPLTPNGKIDRKALPAPEGSLQSGADYVAPRTWVEVKLAQIWQDVLGLAQVGVKENFFEIGGHSLRATTLASKIHKELNKPLPLRSIFEAPTIEQLAVALEQLDQVTYASIPVTEERSFYPLSSAQKRLYVLHQFDPHDVNYNMPSVLQVSGPLDVKRVEHAFRQLIARHASLRTRFDLIDSEPMQWIEDKVPFEVEYTKLQAEGVTTDTDTMASKEVQELVSRFVRPFDLKAAPLLRVGLVDLGVQGVEQESQHLLMLDMHHIISDGVSMGVLTEEFVRLYDGGELPPLRIQYKDYAVWQQSEAHQEWMQRQEAYWLDTFRGELPVLDLPTDFARPAVRSTAGDTVVFGLEREVSERLKELAAHTGSTLYMVLLAAYTALLHQYSGQEDIVVGTPIAGRPHADLEPILGMFVGTLALRNYPTAEHTFRSYVEEVKVRALQAYEHQDYPFEELVEKLNVKRDMSRHPLFDTMFTLQTTEEGELQLADLSFRPYGLEQTPAKFDLTLEAREEEAGIQFGLQYATALYQRETVERMTRHFIRLAEAVAANPDAKLGELELITTEETERILKVFNDPNAHSVRGTLQGLSLSERFEEQAKNSPERIAVVSGDMALTYAELNEQVNRLARVLRAKGVEADQPVGVLLERSADLLVSILGVLKAGGAYVPMDTMYPQERIDYMLQDSGATVVITRRAANLSLSLPSTVQAIVLDDEDVQAQLGAQDANNLIPVAGLHNLAYMIYTSGTTGQPKGVMIEQGSVGNLVDALYERVYSRYDQPLHIAWLSAFVFDASVKQIFASLLLGHTLHVVSRDVSLSGEHLIAYYRTHRIDLSDGTPAHLHILNESVNVTEAPDVKHYLIGGEALSVQLVQGFLHKWSGYRPVITNVYGPTEATVDATAYTIEDVESLNVLLEKGEHTVSIGTPIANQAVYILNTRQQLVPIGIAGELYIGGAGIARGYLNLPELTAEKFVPNPFADATAADPADSSYANRMYRTGDLARWLPDGSIEYLGRIDHQVKIRGYRIELGEVEAQLLTVDGIQKAVVTAWENEDGHKDLCAYIVASESLSLPELRNALQPKLPDYMIPTYVVQLDRFPLTPNGKIDRKALPAPEARLEGGLEYVAPRTPLEAKLAQIWQDVLKLSSVGVTDSFFDVGGHSLRATTLVAKIHQELDSRITLREVFQHFTIEQQAQLIATHGTDTYTVIPAATKQSYYPVSSAQKRLYILSHLEGGDLSYNMPGVLTVEGPLQADRLEEAFRQLVARHETLRTSFEMVDGEVVQRIYDQVEFVVERLQASESEAEVYIESFVRSFDLRQAPLLRVRLIQTGPERHLLMYDMHHIISDGVSSNNIVQELGQLYEGQALKPLPIQYKDYAVWQQQEMQRESYQRREQFWLEHLAGELPVLDLPIAYPRPAVRSFEGAMYEFTVDPNVSEQLHQVAAQTGSTLYMVLMSAYTVLLSKYSGQDDLIIGTPVAGRLLPELEPLIGMFVNTLAIRHQPQGNSTFHNYLLEARDRTLQAFEHQDYPLEELVEKLDIVRDASRNPLFDTMFVLQNTESQEAKLETLSFSPYVQEHRISKFDLTLSMSDEDGQIKGSFEYCTKLFSADVIERLTGDLIAILSQVAANPDLQLSDIQVNFGEQAEGFSPDSIDFVF

SEQ ID NO: 2 - protein, 3748 aa, Paenibacillus polymyxa
  REGION 1..3748: note = strain LU17007
MKALFEKEKNYWSHKLESEDRIICLPYTNHVSRDTAATDSNCHTYTLTFPSEISQRISSITGGAPWAVFMVLLAGVESLLHKYTGEESVLLGIPVAKSGNGATKPINHLLLLKNTLDSSTTFKTLLSQIKTSVSEAIEHQNIPFWNYTEGLEILRNKDDKPLIHTTASLQNIHISDFLHHVQSELDFQFQWENAAVSLNVKYSSDRYDQVTIERFVEQLLRLYTVVLHQPELEICTAQVLSEQEVEQLVHTFNDTAVDYPRDASIHELFEIQAKQVPQQVAVVSGPNSLTYEKLNEKANRLAHFLRKQGIRTEQTVGIVAERSIEMIVGMLAILKAGGVYVPIDSDYPDERVRYLLEDSETKILLVQKMEHRPTDFKGIVLDLSDDAIYETDDADRCNSVLSYDNGMSTDTGNMGYVDCLNPLYSISASPELASTTTIPTEATQSEQAKPIQQVYAAEEQPKATAADRLAYIMYTSGTTGQPKGVMVEHRNVVRLVKHANYARLDADTRILQTGSVVFDASTFEIWGALLNGGQLVLVSQDVILDVLKLKEAVRSHGITTMFLTTPLFNQLSQQDLALFEGIRELLVGGDVMSVPHMTRVLKAHPSLRISNIYGPTENTTFSTVHAINGVQSESVPIGRPIHNSTAYVVDRSMQLQPVGVWGELLVGGDGVARGYRNRPDLTAEKFIDSPFRNGERCYRTGDLVRWNADGALEYKGRIDAQVKIRGYRIELGEVEAQLLKLEVVREAVVTAHEDEQGQKQLCAYVVTHANAQLSELRSALSRELPGYMVPSYFVQLEQLPLTPNGKVDRRALPQPQGSISSGAEYVAPQNQLQAQLVSIWKDVLELERIGIKDNFFEAGGHSLRATNVISLIHKELHKNVQLKDLFQHPTIEQLAQVIEALEQTTYESIPVSGNKPSYAVSSAQKRMYILNQLDGAGTSYNIPGALTLTGSLDYKALDNAFRQLINRHETLRTSFESMNGEPVQRVHDEVPFRVELIHAHGADQKETDELVHGFVQPFDLAHAPLFRAGLIETGPEHHILLLDMHHIISDGTSINVLIQDFIHLYAGDTLPSLRIQYKDYAAWQQEQQQSERYQEQGNYWLNTFAGELPVLDIPTDYPRPAVRSFEGDVLEFTLDQRQSEGLKGIAMQTESTLYMVLLAAYTTLLSQYSGQEDIIVGSPIAGRPHADLSSLIGMFVNTLAIRNYPEGGKTFRDYVLEVKDNALKAFEHQDYPFEELVEKLGVDRDLSRNPLFDTMFALQNLEQTEQQLAELQLAPYPSEQTTAKFDLSLFAQEDGEQIACGFQYGTRLYKRETIERLAVHLQQLINVVIEQPEIALAAIEMVSAQEKEQLVEQFSTTAADSPYPRDQLLHVLFEEQVAQSPDRLAITFADTQLTYRELNERSDRLACVLTSHGIRRGSGAQIQRVGIVAERSIEMVVGMLAIMKAGGAYVPIDPEYPEERIRYLLEDSGAELLLSQRREQISFEPGIPVIDLSDAQLWSSEFEGYTHTHESASITNGGSALDLSHVIYTSGTTGKPKGVMVNHRNVARLVKGNSYATLDENTRMLQMGAVVFDASTFEIWGTLLNGGQLYVVNHDTILDAAKFKQVMNKYRINTMFMTTALFNQHSQQDIEVFASLKELLVGGDVMSVPHVNRVLKEYPQLRLSNVYGPTENTTFSTTYEITEPQTQGVPIGRPIDHSTIYVVNRSLKLQPVGAWGELLLGGDGVALGYLNRPELTAEKFIESPFRPEEYCYRTGDLVRWRADGVLEYKGRMDEQVKIRGYRIELGEVETRLSTIAGVKESVVTVRQDDSGQKQLCAYFVTDSELSASDLRSVLSQDLPSYMVPSYFVQLSKLPLTLNGKVDRRALSAPEPNVDTGMDYVAPETDVQLALAAAWGAILGIQKVGTQDNFFHLGGDSIKAIQVSSRLFQAGYKLEMKDLFKYPTIAGLSTYIQPVKRVAEQGEVTGHVVLTPIQRWFFEQSTDEPHYFNQSVMLYRQEGYNERALRLALHQITAHHDALRMTFRSSENGYTAWNRGVGEGEPYHLECFDYRDSEVIEENLEKMIEAKCNEIQSSISLSEGPLMRLGLFRCPDGDHLLVVIHHLTVDGVSWRILFEDLATAYEQAAKGEQVIQLPHKTDSFQTWAEKLHAYANSPAMERERAYWEGIAQAKPAPLPQDYGHNEHDKPLIGDSESVTALWTHEETEQLLKQANRAYRTEINDLLLTAVGMALQAWSGHDRFLINLEGHGREAILPEVDITRTIGWFTSQYPVLLDMPKETALSQRIKHAKEGLRSIPQKGIGYGILKYLAEVSPALCEVDPEISFNYLGQFDQDMKGNDLQSSPYSGGMPLSPTMARTYTLDFGGIISGGQLGLTISYSRTSYRPETIERLASLLESSLREILKHCIHKEHPELTPSDISYKGMRVEELDSLLSEMGATGEIDNVYTLTPMQKGMLFHSQLDSQAAANDAYFEQVSYDMQGQLDIQAFAESLNTLVRRHEALRTHFYFGRDTEPLQVVYRNRDCGFYYEDLRELDSDTRDTQLTNFKLQDKARGFDLRRDVLLRVAILRTREDRYHFVWSFHHIVMDGWCLSLVNKEVFESYAALRERRVPELAPAVPYSRFIEWLEAQDRNAATDYWSSYLSGYEQQTALPAVKSGRKSEGYMASDWMTDWEHELALRVEETAKRYQVTMNTLLQTTWGILLQKYNNHSDVVFGSVVSGRPSDIIGVEDIVGLFINTIPVRIRSEAGETFAEVMKKMQEQALASHAYDTYPLFEIQALTDQKQNLINHIMVFENYPVDEQIEEMGSDGQELLSVSNVTATEQTNYDLSIVVMPGEGIKIRFMYNALCFDQADIERLHGHFVHLLEQILLNPNVCVEELELVTASEKQQIIGEFNDTALAYSYNQTIQKRFEEQVERTPDHIAVVWGQQSLTYRELNERANRLARTLRAKGVKPDQSVGIMVYRSLDMIVGIYAILKAGGAYVPIDPEFPADRICFMLEDSGAKLVLTQSHLAEQASLSFDGQVLVLDHEDIYHEDGSNLEPLAGPHHVAYVIYTSGSTGKPKGVMVEHHSVLNRILWMHDRYGLSAEDTILQKTAFTFDVSVWELFWWSMVGSKVSLLSVGGEKNPEEIVDTIARDGVSTMHFVPAMLHAFLEYVEQQPREAMQAKLGTLRHVFASGEALPPQHVARFQRLVSSLAGAKLINLYGPTEATVDVSYFDCEPDEEYAVIPIGKPIQNIRLYIVKEGTEQLQPIGVAGELCIGGVGVARGYLNRPELTAEKFVKDPFAGGKAGYERMYRTGDLARWMPDGNIEYLGRIDHQVKIRGYRIELGEVEARLASVPLVRDGVVIALQDGIGQQQLCAYFTADEQLTVREIRAVLLGSLPSYMIPSVFVQMERIPLTANGKIDRKALPTPDTALRTGIEYVAPRTDVEQLLAAIWQEVLDIPQVGIHDDFFTLGGHSLKVLELIRKVHLATGIELPIRSVLEFPTIEEQALTLLKADLEYKADSPIIRLNEHGPVSIFCFPPMLGYGLSFAELAKQLDQDAVVYGLEFVDDAADEQAMLARYVDLIVSTQAQGPYVLLGYSIGGNLAHKVASTLERQGHAVSDIFMLDSVKRTEALPFTDEETEQEIHAMLEQVPESYRELLNETYQRKMIAYAVYGNQLVNTEKVQANIHGFDAVGSETVKGTGDNRLLWKDATQGSYEEHSLIGNHYELLEPGFIEENVKGIRAAIQKITRNMDKGMAQGLTHHNS

SEQ ID NO: 3 - protein, 633 aa, Paenibacillus polymyxa
  REGION 1..633: note = strain LU17007
MKNRGFYYLSAFLAALYLWNLLIASVWAADSITPNSVEKAVDDIMSTELEKLHTPGAAVVVTQEDHILFSKGYGYADLEQKVAFDPAKTIVRVGSLTKSFSASAAMQLVEQNKLDLNQDVNRYLHSYKALQYQNHPFNLHQLLTHTAGLDEAIYDINSSTRAGVLPTEQYLSTYFQKQPPIRKPGIRYEYSNVAFGLIGNIVEQVSGQGLNDYLSTHLFRPMNMPSATLELPLNNPALAQSYQWKREAYLKQPFSYINLPGAGALNVTPNEFSHYLITHLNQGKYKGKAVLQPQTVKAMHAQQFAADARLDGIGYGFFRGQLETGVHMLWATGKIDGFISKMVLVPSQKIGIFVISNSADTDTLLHGKVINAIAQILPAEPQAASQSPVRSVKEIKLLPEIEGVYQLNLNPIHGWGKWLRMLGSVKYTVRIQDDHTLIVKGKFPDQNEASDKVFQAAGDGLFVEKGGQLKILLYQENSTWMMIAPDSETMKQTTFWHRTWTLLVSYAASSLFFITTLLIWMIRYVLRAIRKTNNHISSNLAYIALLNTIFLGVQVVYANNQMVYGYSAWFIWGICTLPLLSALIAVWVLIVNGAKLITGEKRTRAAGKIVFAVLTLLHTAYLYYWNFLPFHYS

SEQ ID NO: 4 - protein, 267 aa, Paenibacillus polymyxa
  REGION 1..267: note = strain LU17007
MGIFRRFTSRSFKYATAMVFTLSLYAGVVGGIQPARAEGPADPAPFIAAKVVNENAGKKVLFDNTHGQTAGAADWVIDGGFSDFGQALANNGYDVHELRQSTPITYNDLKNYDVFVTAEPNIPFKQSEQAAMEQYVKAGNSIFFIGDHYNADRNKNRWDGSESINGYRRGAWEDPAKGMSEEEKSSTAMQGVVSSDWLGSQFGIRFRYNALGDITANQIVEPAQAFGITAGVSNVAMHAGSTLAIIDPTKAKGIVYLPKTNQAWGMQ

SEQ ID NO: 5 - protein, 748 aa, Paenibacillus polymyxa
  REGION 1..748: note = strain LU17007
MGNAVDQGVYNGGGIAEGPYAAVAKVGLGKAAFIGDSSPVEDATPKYLREETGTKKTTYDGFKEQDDAVLLVNMVDWLSKKEEYTSLSYVKNLHLDQPTELLSFEDPQASTEPQAEPWSAPAAGYKWWDQRTFKAGSYGGSTASAQPVYSIVRQEQLPNVQPFQIRIVADQLAPNSTISGFSAGIYVAGGNQVAQIQNPDGSWPTSYGYSGTFSLESDSKGHAYRDLTVRIKPGTSGSANLRLRQNGSNLLTQSVVLADVPAQPLPEDGNTIPARISVAEARTLSAGKVVTLEGVVTTEPGAFGGQAFYMQDESGGIYVYQNQSGFHPGDRVKITASLALYNSEVELTDPVAIEKTGEGQLPQAVQVTELNDANQGQLVELPTAIIRNVIDATPVGSFEFDAVAGEVSHHVRIDARTGLTRTSFPYQEGQQVKLKGISAVFKGNYQLKPRGLDDFSAQTDATLQEVELSLDQTTFNVGDTVATHLKGTLTDGSQADLSNASVQYSSSHESVALDTYGELRALKEGSAEITASVTLDGKTVVSNPVTVRVEKTAAGEVPGKPVLSHDNGQETGLKDGDYNITMNLWWGTNGDELKWYENDKLIETQSLQAASPEAQHAVISVTGKSNGTYTYTAELINASGKTVSDPLTVEVTDASPGIPVLSHNNWDGDGDYTLTMNMWWGTNATQYNLYENGKLIDTQDLPSQSPQAQSAATNIQNQKPGTYEYRAELVNAAGEVSSQTISVEVKER

SEQ ID NO: 6 - protein, 39 aa, Paenibacillus polymyxa
  REGION 1..39: note = strain LU17007
MSEFDGEYFAEVIIIVILVAMIFYGSSDIEGLSASPTQS

SEQ ID NO: 7 - protein, 115 aa, Paenibacillus polymyxa
  REGION 1..115: note = strain LU17007
MASLGKNGNGNGNRKSKSPPNGQKKNGLNSNSAIFSALQGKNVEVLVAALLLTGKLNVDSVTLYRQATLFLGLTGKYKTLASAPTNVDNMVKFLNDNGNMTLDQVIQAFSQKINT

SEQ ID NO: 8 - protein, 159 aa, Paenibacillus polymyxa
  REGION 1..159: note = strain LU17007
MSNEEVLLTKEGLAKLEEELKELKTVKRKELAERLKLAISYGDLKENSEYHSAKDDQAFMETRIMVLEKMLTKARIVDESNLDLKTVSIGSTVILNDIEFSEKVEYKVVSPAEADVLDNKISYESPLGKALLGKEVGSIIHVDAPMAVIKYELLEIKLT

SEQ ID NO: 9 - protein, 179 aa, Paenibacillus polymyxa
  REGION 1..179: note = strain LU17007
MTESSKRSGTDRREQLLLWLKSESPLTGSELARRSSVSRQVIVQDISLLKASQEPILATSQGYIYMEPTAQVAPLASRIIVCNHRPEQTEEELKLIVDYGVSVQDVIVEHPVYGDLTAPIRVGTRKEVDDFIRKISSTQATYLSQLTGGIHLHTLHASDENKINDACAALEQAGFLMTD

SEQ ID NO: 10 - protein, 384 aa, Paenibacillus polymyxa
  REGION 1..384: note = strain LU17007
MIYLDYAASTPMCDEALHIYSVMNKEMFGNASSLHDAGGQAAYTLDYSRQRMANMIGGHKEGIYFTTGGTESNMLVVQSILNGLPPHKKHWIMSALEHHSMYNLATFLEHQGYELTIVQPDREGRITREVLIPHLRDNTGLVSVQHANSETGLIQDLAALSPLLHERGILLHSDAVQTFGNVHIDVEAMGVDALSISSHKVYGPKGVGAAYLKPGTPWRPVYPDTLHENGFRPGTINVPGIAAFVAAAEMMTEQMEMHQERYATLRRYFITKIQERSIPLRWVVEESEKKAVLHHIVGCFFHGYEGQYVMLECNRSGVCISTGSACAAGHHDPSPALQALGASGREALQFIRISFGRTTTIEELNVLVDILTDLTHQQERSLSR

SEQ ID NO: 11 - protein, 368 aa, Paenibacillus polymyxa
  REGION 1..368: note = strain LU17007
MSMLDVLQGNRGLMPEHYKTQTVADMEQRVAELKQKWGSKLLIPGHHYQKDEVIQFADITGDSLQLAQMAAQNQEAEFIVFCGVHFMAETADMLTTDQQTIVLPDMRAGCSMADMANMEQTERAWKHLQELVGDTIIPLTYVNSTAEIKAFVGRHGGATVTSSNAKQVLAWALKQKERILFLPDQHLGRNTAHDLGIPLDEMAVWNPMTDQLETERNPETVKIILWKGHCSVHEKFTVDHIRNVRERDKNIRVIVHPECSHEVVQLADCAGSTKFIIDTIRAAEPGTQWAVGTEMNLVQRIRQQYPEQQIESLNPDMCPCLTMNRIDLPHLLWAMEQIDRGEPVGVIRVDAQIRQDAVQALNRMLAIR

SEQ ID NO: 12 - protein, 106 aa, Paenibacillus polymyxa
  REGION 1..106: note = strain LU17007
MFELQDLLPYLLTIGLLCTVTYTYLAHLHGSVAECWVEGGPVRSHASPLMPISARGQDMPVRLARHIRRKEAPDEDASDCSPLLNDGTVNQRGGTYETIQGIHFLG

SEQ ID NO: 13 - protein, 277 aa, Paenibacillus polymyxa
  REGION 1..277: note = strain LU17007
MKRFKGFTFWGKQERILGLIVALAVVMLLSGCGANAAEINAQTPGFFNHYVVFPLSWLIQHLAQWFGGSFGLAIMTLTFIVRLALLPLMMRQTRAQQGMKRKMSAMQPDLDRIKKKYENKKDATSQQSMQQEMMSLYKEHQFNPLNIGCLPILIQLPILSGMYTAIRLTPELASHSFLWFRLGQPDWILAIVVAVVYLAQAKLSQLQMTADQRKQFAIMGYLSPIMMAVFSFNAPAAMPLYWTVSGTFLLLQSLWFRKRYPIEEAENKIKLGEVTPT

SEQ ID NO: 14 - protein, 258 aa, Paenibacillus polymyxa
  REGION 1..258: note = strain LU17007
MENSTTTTEWYENQIREDGCFCMRSMQKAPGYVQKLNWTEKEFTQGLTYIQLRKDNKPVGFIEYALGEQAWRAVHADGYLVIHCIWIAVTGLGLGSQLIQRCIQDAITLGKKGVAVVTNIDTSWAPGPEIFLKNGFRHVEDAPYSFQLYVYKLNQEHSDPYFPDNWVLRLDRFSEGLTILRTHQCPYLEIATHNVIEAAETVGIQPEIIDIRDRSQLMELSPTPYGVFHVICNGELISYHRMTPRSFAKKLTMLYSKS

SEQ ID NO: 15 - protein, 223 aa, Paenibacillus polymyxa
  REGION 1..223: note = strain LU17007
MKQLPTKLPISVALLTCIVCALGFCLIALWVSDHQVRHFDHKIITAIGQLESPAMTRLMKCFTMIGSGIPVVIIILIAMFVLYSVLGHRRELFFLAVAVLGSVLLNMVLKMLFQRARPEINRIIEANGYSFPSGHSMTAFSMYAALTFLLWKHVPSRRGRILLVVLSSLLILTIGASRIYLGVHYPSDVVGGYFMSGCWMAACIWFYQRYEERMLSLRTKSTA

SEQ ID NO: 16 - protein, 216 aa, Paenibacillus polymyxa
  REGION 1..216: note = strain LU17007
MLINVDFALFHWINELADHLAFLNGTMRFLAQYAPYLFGVALLIYWFTFKMPHRMMVLEAVITVCIGFMISWGLGHLFYRDRPFVGHSVIQLIHHDPNASFPSNHALGAFALAAILWLHHQKYRVLWVILAMLIAISRVWTGVHYPSDILAGALIGAGCAVGVHKFIRSRKLPGIFMQAAIILYEKWEQKLGLKPAAQTRTKMTKSTSSVQIKSRR

SEQ ID NO: 17 - protein, 236 aa, Paenibacillus polymyxa
  REGION 1..236: note = strain LU17007
MDKSVLVIDDEEKISRLLQLELSHEGYVVEIAQTGREGLEKALAHTWDIIILDVMLPEINGVEVLKQIRKVDNHTPIIMVTARNTTPDKVSGLDEGANDYITKPFEIEELLARMRASMRNQLEPATASPKEDKQQSKLQVDSLVLEPKTRSVVREGKRIELTPKEFDLLLYLMEHKNQVLHRDQMIQDVWGFDFVGDTNVVDVYIRYVRKKIDHGYKKKLIKTVRGVGYSIREEDH

SEQ ID NO: 18 - protein, 458 aa, Paenibacillus polymyxa
  REGION 1..458: note = strain LU17007
MKLRTKITLLSSILVMTILLFVDVTVHLLFVKIATRNEREVLQNKWTEIISETGPTMILKNAWGPKLKDELSGDTILRVFDQQSRLLYEVSRQSRFKLDDIRFNLSQSSQLTDLQNHKILIIHLPVLSPEGSQKGTLEIVEKWDALENNLDILNTILITSTVGAMLLSLVGSTILANAILLPISSSIQTMQEIERSLKFKKIPVGSHNQDELSQMTATFNLMVERLEESFQSQQQFVSDASHELNTTLMIIEGYANMLRRWGTRDEDIRKESIESIYEETQRMRTMTQQLLTLASSQQQAPEPYEPVELVGCCQQVVAHLKPVHERQISIFTEEKEIWLDANLAKIKQLLVILLDNALKYSSDEIEIWISTDEKDVHLQVKDYGIGIPEGEIKRVFERFYRVDSSRHRKTGGTGLGLPIAKTITDAHQGTIRMESVEGEGTEVIVTLPQKQQKRLSLQ

SEQ ID NO: 19 - protein, 157 aa, Paenibacillus polymyxa
  REGION 1..157: note = strain LU17007
MKRTSKKLWMGICFTMTLALSAGSFVVGSDTTHAASTSKADRIISKGSQYMGVRYEYGAPAGSTSSFDCSSFTQYVFAQNGIKLPRSSKQQSTVGTYVPRSQLKKGDLVFFYAPIHHVAIYMGDGKILHTYGKGGVTITKLNSGWWNSHYTTARRVL

SEQ ID NO: 20 - protein, 338 aa, Paenibacillus polymyxa
  REGION 1..338: note = strain LU17007
MASRQSKALKNRPLTIVQVISNYPDAQPVPSIKGGTEKVVHELTEELVRRGHHVSLFAARGSRSSARLITYPKGLKHSQIPQYVLRHMPSGTHIIHDHTFRSAVARRKLPCSSLCTVHLPVKRHGKNPVYVSKRARQLMGGGKGFYIYNGINTHEYEFSSEKRGYLLFMGRIIPDKGVLQAIQVAERTGKRLLIAGPIKAPVFFRREIQKRIQRNPNIRYVGPVGGDRKQKLLKHAECLLFPSLWEEPFGLVMVEAMACGTPVLALKNGSVPEVLSGFPQLICKSVGQMARKAQQKNYPSPAQLRLYVNQRFTNKQMTSNYLRLYREIIRRREQKRGH

SEQ ID NO: 21 - protein, 241 aa, Paenibacillus polymyxa
  REGION 1..241: note = strain LU17007
MQVNRYMLGKGSSWATPYYVAIEGQKGPCAMVVAGIHGNEIASIRAAEKLVKLLNEQKLRFSHGKLIIVPIVNQEAYRKRIRGKPDLNRTFPRQKKQAATHPLSAALFKLTQKHHPEWYLDLHEANGLSQKDAKVLGQTLISNKGNPVIPTTRRIIKRMNRSIKVKDRHFNMRLHELPGSSRTAAARILGARAVTVETGWSLSQKVRIHYQMKIVQHFLREAGIVKANKVYLSGKVKTVTL

SEQ ID NO: 22 - protein, 447 aa, Paenibacillus polymyxa
  REGION 1..447: note = strain LU17007
MRIVLLCGGAGKRLWPLSNDIRSKLFLRLLPAPDGQQESMLGRVYRQLTLAGLDSSALLLAHRSQVNLAFRHTEGRLPVLGEPAKRGTFTAAALAAAYFHTRGMGLDEVLCIAPADMFAGDDFFHSIAALSGLLLESGADLAMLGTRPTHASDQYGYIVPDLQMRQEGKSAYAQVARFTEKPALSRAQQLINQGALWNCGIYAFTLRYMLSCMEQIQLPLNDEELYTIYDSLPVRSFDKEIAERTERAVVLPYEGEWHDIGNWQALTEQIGSQVIGRGQISGQTHGTHIVNELPYPLHVIGVEDIIAAASPDGILIASKSHAHAIKEQLGNLQLHPMHGETSWGSYRVLDEFDHRSPNDILAIRLTVLPDHRLNGRIHGSGLKVWTIVSGRGEVMLNGERFAAASGSVFSIPVDTYHTIRADLDTALELIEVRLGHSLVSAFYKSDS

SEQ ID NO: 23 - protein, 198 aa, Paenibacillus polymyxa
  REGION 1..198: note = strain LU17007
MSAQSDEPQKGSLSIDVLIPAIEKDLATLPLVIDSLRRHVQHRIATIYIVSPQSTKLRRLCANKKCTFIDEKTVLPITKKHIRYGTTRWDRSGWLYQQLLKMNGDKISKSSFFLVIDADTILIRPHTFRKDGKTIFYYRSWSQPEYFRTYRKLMGAKAPSPKSFVTHYMLFEKTRLAQLKQVIETRHGNLGTTPLFKV

SEQ ID NO: 24 - protein, 149 aa, Paenibacillus polymyxa
  REGION 1..149: note = strain LU17007
MNSSQAQALRSKWHKTQLLLQHGSIKPFVPETRKYSKANVKSMLEKYGMVYVKPERGTFGKGVMKVEQEAGQRFAYQYEEKRLEFKHLDALITSLSKHTGKKVISFKRESIYCAIKIVILISGSWCSVMQKGHGNLPELLDAWVIPVKS

SEQ ID NO: 25 - protein, 138 aa, Paenibacillus polymyxa
  REGION 1..138: note = strain LU17007
MTNYHSGGKPMALEQLLKSHLSQSKQAELVKKLNELGITIATQLQKTYPKFRQIGVDIGLDHRFIPWIIEVNTKPDPYIFNQLTDKSMYRKVISYWRLANEKKKVAVPSKDKKNNNKNKDKIANKVDHTNKEPKSKKG

SEQ ID NO: 26 - protein, 116 aa, Paenibacillus polymyxa
  REGION 1..116: note = strain LU17007
MQNLGLAADELALLPKKEAYFAKGPVPSIASYDAYPRASSDLITKHRYPLMAKQPRLAPGGGTQRTVTVVDFPISSTMAGSVIELEPGGLREMHWHPNADEWQYYLDGVVITRPLI

SEQ ID NO: 27 - protein, 259 aa, Paenibacillus polymyxa
  REGION 1..259: note = strain LU17007
MNSVIELNNVSWKRDNRTILDQINWQVAEGEHWAVLGLNGSGKTTMLNMINGYIWPTTGSVGVLGHTFGDVDLRELRKSIGWVSSSLQERINGSQRTQDVVISGKFASIGLYDQTTDTDDKQAVQLMTQLGCAHLVDRLYQGCSQGEKQKVLIARALMASPKLLILDEACNGLDFFSREALLDSVRQLSETPGAPNLLYVTHHIEEILPMYTHTILIRRGTVFAKGKTTDILSSETLSAFFETPVQVDWRQDRAWLSMV

SEQ ID NO: 28 - protein, 196 aa, Paenibacillus polymyxa
  REGION 1..196: note = strain LU17007
MPLILLAFGQLGLDKASVYVVIQMIMVNTIGVYFAARSEFSVQSAVKSVFSLPAIYAALLALGLRALDWHLPSGIQSGVSMIAAAYSPVVLAILGTQMAYVKIFRLEPSIKKASYAGLIIRLLLSPLAACLAMLILGISGLLFSVLFILASMPVAVNAVILAEKFNASPKLVSTCILWSTLASFLILPILIMLVAG

SEQ ID NO: 29 - protein, 100 aa, Paenibacillus polymyxa
  REGION 1..100: note = strain LU17007
MVQIVLSTLLSVIVPLSIPVIAGFLLGKFMKLETKPLSTLYLYFLSPAMILDTLLKAQLSWHDVALTAAFSLLNLLLLWGIAQLAGKIFRLSPRKRRDSP

SEQ ID NO: 30 - protein, 297 aa, Paenibacillus polymyxa
  REGION 1..297: note = strain LU17007
MCEHAYRILLFYKYVNIEDPATFTAEHLAYCKELGVKGRILIAEEGINGTLSGTVEQTEQYIRDLRANPKFHDIVIKIDESDGHAFKKIFVRHRQELVTLRHEDELDPNVISGKRLSPKEFYEQLQDENVVVLDGRNDYEYDIGHFRGAIRPEVESFREFPQWIRDNMTGFKDKKILTYCTGGIRCEKLSGLLIKEGFNDVAQLDGGIVTYSKDPEVQGRLFDGKCYVFDERISVRINHTDEDVVVGNCYHCETTNDHYINCPVCNLQHIVCPDCEEQHQHYCSDDCRTKAETMASA

SEQ ID NO: 31 - protein, 429 aa, Paenibacillus polymyxa
  REGION 1..429: note = strain LU17007
MKHHLTAHTPPMGWNSWDCYGAAVREEEVRGNAQYMAEHLKEYGWEYVVVDIQWYESGAVSSQYRPFVPLEMDSYSRLIPAVNRFPSAADGRGFQALAEYVHGLGLKFGIHIMRGISRQAVHQDTPILGTTATARQIALPNSICPWNTDMYGVDASKEGAQEYYNSLFDLYAEWGVDFVKVDDIAASRLYGIHLAEIELIERAIAQCGRPMVLSLSPGPAPLEHASDLIANANMWRMTDDFWDVWPLLYGMLERCEKWAEHVGPGHWPDCDMLPLGHLGIRSVDSVDSGSHDRWTRFTKDEQLTMMTLWSIFRSPLMFGGELRDNDEWTLSLLTNKEVLDVHHNGVNARQVYRKDEHIVWTSHNEEGHVYAALFNAGDEASTVRVSLQELGIEGQASARDLWNHVDLGDIVQELSADLPPHGAALFIIK

SEQ ID NO: 32 - protein, 156 aa, Paenibacillus polymyxa
  REGION 1..156: note = strain LU17007
MKLKKIHKNEQDEPWPSSEQILCIGGANLDRKIMIKGTFQLHTSNPSSTSLQSCGGVARNVAENLGRLSRRVSLLTAVGDDAEGEFIIEQSSRYMHVIPLQVKGESSTGVYTALLNEHGEMIVATAEMEIYDQIRPSIIFENIPFNRLVPTRSAGH

SEQ ID NO: 33 - protein, 102 aa, Paenibacillus polymyxa
  REGION 1..102: note = strain LU17007
MFASQDGTYGQIPIHPFQQVIDVTGADDAFIAGMIYGITQGYPMEQVCQFGISCVDLTIQTDRTVSDTISMNKLHSRFQELYGTHSQNFVFFKGVYFKKKNT

SEQ ID NO: 34 - protein, 231 aa, Paenibacillus polymyxa
  REGION 1..231: note = strain LU17007
MDSVKYAIVFLPLFLLYLLLKGGALAVGLLYRLIYSISTLRAGQSDDLLAVQHAKRIIVIGSPGSGKTFLAKRLSMWTHLPYTSLDDLYWGPEWKQSTDKQFHKQLGEVLQREEWIIEGNYHERYFTERLQRSDTIIVMDVSTIEAISGVITRSLNRFLFSKELPTGIEREAVRIWDISPRFVRFVLGFRRRIRPKIWPLILQYGNERNLIILKSKYRSCPWMSPDRQLSP

SEQ ID NO: 35 - protein, 155 aa, Paenibacillus polymyxa
  REGION 1..155: note = strain LU17007
MRQSQLLLTTLREAPAEAEVISHQLMLRAGFIRQLAAGMYTYMPLGRRVLRKVEQIVRDEMDRAGAGELLMPVLQPTELWQESGRYDVYGPELMRLQDRHDREFALGPTHEEVITSLIRNEVNSYRKLPVTLYQIQIKFRDERRPRLVCFAAENF

SEQ ID NO: 36 - protein, 425 aa, Paenibacillus polymyxa
  REGION 1..425: note = strain LU17007
MKDAYSFDANWTGLDHTYWTMFQAYQRIFTRCSLNFRAVEADAGAIGGEGETHEFMALAEIGEDTIVACTCCDYAANLEKAEPRTTGSVGISSVSNEDEHDSHPSIDTDKMEKLYTPGLRTINQLVETLHIEPKEIIKTLIYMADDQPIAIVVRGDHEVNEVKVKQILGSEKFEIANADAVTKATGTPPGFIGPCGLTIPVWVDYAVVQMSSGFAGANEQDYHYRHVNPGRDLDLRYVADLRNVIEGDRCPRCDEGKLELHRGIEIGHVFKLGTKYSEKLGATFLDASGTDQAMIMGCYGIGVSRILSAIVEQNHDQNGIIWPHALAPFQVHIIPISVKDRLQMQIAEDLYSQLQDRGVEVLLDDREERPGVKFKDSDLVGIPVRIVVGKDAEHGKVEFVERRSSHKESIHIHDVERRILNLIQH

SEQ ID NO: 37 - protein, 254 aa, Paenibacillus polymyxa
  REGION 1..254: note = strain LU17007
MKEIIHLDVLHKKLSNNHEITVYETTELYGEKGLFRVMQFSNAAIQGAMDLNHPQRILFEYPRAIIHLMELNDPSFEDVFVIGHGVGTIAGHFADKRFKIAELDAQVVEFSQTFFGYDQDNVVIGDGRRILEKESPDAYDYIILDAFTEQGTPLHLISWEFFKMAKEKLDAEGSLIMNLIGKSEHDHLIHAIHTTLREEFAYVTTFSLPSEGIADIQNIIMIGRDKPIRFQARQMADFHEITLGEGHVLRDTDA

SEQ ID NO: 38 - protein, 268 aa, Paenibacillus polymyxa
  REGION 1..268: note = strain LU17007
MFVCPLGDIIYKDIMKFVVYIHTGRERDIMGRKWNNIKEKKASKDANTSRIYAKFGVEIYVAAKQGEPDPESNRVLRVVLERAKTYNVPKAIIDRAIEKAKGAGDENYVELRYEGFGPNGSMVIVDALTNNVNRTASDVRSAFTKNGGSLGVSGSVAYMFDSTAVIGLVGKTADEVLELLMEADVEVRDIIEEDEAVIVYAEPDQFHAVQEAFKQAGVTEFTVAELTMLAQNDITLPEDAQVQFDKLIDALEDLEDVQQVYHNVDSEE

SEQ ID NO: 39 - protein, 194 aa, Paenibacillus polymyxa
  REGION 1..194: note = strain LU17007
MGRAKEFDTESVLRKAMAVFGEHGYEGTSLTILLDQLGIARQSLYDTYGTKYDLFFSAIQLYIRDKTEAVVHLLSQPGSIKDAIATIFNESVRVLTDKRLSKECFIMNSAIEQAPHHHEIKAFISENTEKLELAFYNALVRAQKEGEIHATESELLSIARFLNHARLSLTFTAKTGASTEVLRDIVRTTLSVLD

SEQ ID NO: 40 - protein, 142 aa, Paenibacillus polymyxa
  REGION 1..142: note = strain LU17007
MNINPNTDDAKQQAQAVMHKFTSNLLEENMEQWISLFDDNAVFEFPYAPKHFVQVLQGKAAIYEYIKEFPSILRIQHFSSPTIHTTTDPGLFVAEFASEAQAVSTGKPYNQTYISVIKLKNGKITHYKDYWNPLVALEALES

SEQ ID NO: 41 - protein, 286 aa, Paenibacillus polymyxa
  REGION 1..286: note = strain LU17007
MKDRNIALITGANGKTGSRVAARLMQLQYPVRLAGRTKPGNSEGADYVFFDWYDESTHAQALMNVGKIYLVVPVLDVNPAKVMIPFIEKALSAGVQRFVLLGSASVPEDGPVFGPVHQALRRLAPEWAVLQPSYFMENFTEGQHVGTIKNNKAIYSATRNGRIGFVSADDIAEVGVRALIDDKPHNTAHVITGPQSLTYDEVAELIGKSTVQPIQHISLSDEELKAGMVHAGMPEEYADMLAGLDRRIRENGSEDQVTDTVKLVTGRCPVSFEQFVLSHGNSWKTS

SEQ ID NO: 42 - protein, 101 aa, Paenibacillus polymyxa
  REGION 1..101: note = strain LU17007
MTVFGGNGAARTFDFRAGDVGYVPFAYGHYIQNTGSSTLWFLEMFKSDRFADVSLNQWMALTPKELIQSNLHVGADVISNLRKVKWPVVKYPGYSYDPKKK

SEQ ID NO: 43 - protein, 265 aa, Paenibacillus polymyxa
  REGION 1..265: note = strain LU17007
MRDLQNPDMLVPPVTDNGLIPNMRFSFSDAHMQLNQGGWSREVTVRELPIATTLAGVNMSLTPGGVRELHWHQQAEWSYMLLGSARITAVDQDGRNFIADVGPGDLWYFPPGIPHSIQGLEEGCEFLLVFDDGSFSDLNTLSISDWFAHTPKEVLSANFGIPEADFAEIPQDQVYIYQDSVPGSIQSQAVPSPYGTLPQSFKHELLAQPPIKTPGGSVRIVDSSNFPISKTIAAALVEIEPGAMREMHWHPNNDEWQYYLAGKDG

SEQ ID NO: 44 - protein, 159 aa, Paenibacillus polymyxa
  REGION 1..159: note = strain LU17007
MSVSKTNAMRILDGQHIHYNILSYEHQDGKIDGMNVAEKIQRAPESVFKTLVAHSKQNLFVFVIPVHKELDLKKAAKSAGEKKIEMLPVKDLQKHTGYIRGGCSPIGMKKIYPTYIDQPAVELETIVVSAGKIGTQVELSPHDLAQIIQAQFTDLTHTA

SEQ ID NO: 45 - protein, 111 aa, Paenibacillus polymyxa
  REGION 1..111: note = strain LU17007
MATSEYVAIIALILSVILLFKVYHLQSRLNDLKSDVERLENRSGLTGTSMSNTIAPPAPHIQHADASEEINERLLLLIREGNKIKAIKELRTAKNLSLKDAKDYVDYLEKR

SEQ ID NO: 46 - protein, 121 aa, Paenibacillus polymyxa
  REGION 1..121: note = strain LU17007
MATCGNILNELLQTGEVLEMELEESNGGRPARRYKYNADYSYIICLTVKTEGGVDSLTYAVANMLGDIIAENTSVVPHIDYEVIDHQIEELINNYENVKAIGIGIPGLFIKGLLMSAILIC

SEQ ID NO: 47 - protein, 158 aa, Paenibacillus polymyxa
  REGION 1..158: note = strain LU17007
MHLTVYGFYNMQNYDEDKTFAIVTFPKDNFPGAGFIVDGHLLKGNTKFAGEVSFLPFGITREEQLKQLNSTQEFVFLAIKTITSIIAIIDPVSIALTGELSKPALLDDIYNGCLKDVPKEHMPEIFVKNDTHDEYMYGLISVTLESLTYNLQLVEKRK

SEQ ID NO: 48 - protein, 471 aa, Paenibacillus polymyxa
  REGION 1..471: note = strain LU17007
MSTQFPKDFLWGGAVAANQLEGAYQEDGKGWSIQDVTPRGGWGPVTDVPTEDNMKLIGIDFYHHYKEDIKLFAEMGFKVFRTSIAWSRIFPKGDELEPNEKGLQFYDDLFDELHKYGIEPLVTLSHYETPLHLSREYDGWVNRKLVDFYERYATTVFNRYKDKVKYWLTFNEINSILEAPFMSGGISTPKDQLSEQDLYQAIHHELVASARAVKIGHQINPDFKIGCMVLSMPTYPLTPNPDDVIAAMEFDHRNMAFADIHARGQYPGYMKRFFKENGISIHFEPGDAEDLKHTVDFISFSYYMSTCETADEAKKVKGEGNILGGVSNPHLEASEWGWQIDPQGLRYVLNTFYDRFQKPLFIVENGLGAVDELITNEKGEKTVEDDYRINYLNDHLVQVGEAIEDGVEVLGYTSWGCIDLVSASTAQLKKRYGYIYVDRHDDGSGTLERYRKKSFHWYKEVIATNGESLKR

SEQ ID NO: 49 - protein, 42 aa, Paenibacillus polymyxa
  REGION 1..42: note = strain LU17007
MTEKEKSQLGLKDIPSGVIAAGNPCKVIRKITEDDKHKYKRN

SEQ ID NO: 50 - protein, 203 aa, Paenibacillus polymyxa
  REGION 1..203: note = strain LU17007
MNVRGTFLNYNGLFRKEGKNMKLMFISDIHGSLYWLQLALEKFKEEKADRIVLLGDYMYHGPRNPLPEGYNPAEVAAMLNQYKSHIAVSVRGNCDAEVDQMLLEFPMMGDYALLYHEGRRIYVTHGHGFSIGNLPPLEAGDVFIQGHTHIPVADVENGVFVLNPGSIALPKENYPSSYGVLEGAQFTVKDFDGCTVKTITFSK

SEQ ID NO: 51 - protein, 343 aa, Paenibacillus polymyxa
  REGION 1..343: note = strain LU17007
MQIKDSYYKMPPEWAPHERTYISWPVQSSMVYPEMHAEVSKGYAEIISAMAEFEPVTVVVNPDDLESVKALELGERVELLPIEHSDAWLRDNGPTFLTDEHGQLAGVNWKFNAWGGKYAPWDLDDQVAPQILDQLGVPRLDAPLVMEGGSLHVDGEGTLITTEECLLNPNRNPELSREEIERYVCEYTGAEKIIWLKRGLSGDETDGHVDNIACFAAPGKVIMQVCDDPEDENYEITQENLRILEQATDAKGRKLEVIQIGQPPRVDYEDSRLTLSYINFYFVNGGIILPVFGGTAAESDLAAQQVLAKVFPNRKIRTVDGMAVIREGGNVHCTTQQMPAVKR

SEQ ID NO: 52 - protein, 291 aa, Paenibacillus polymyxa
  REGION 1..291: note = strain LU17007
MRKVKVAATQMSCSTNIEENISKAEKLVREAAAQGAQIILLQELFETPYFCQKEKSDYYVYATELEHNKAVNHFKKIAKELQVVLPISFYEKKNYARYNSLAVIDADGEVLGKYRKSHIPDGPGYEEKFYFNPGDTGFKVWNTRYAKIGVGVCWDQWYPEAARCMALMGAEILFYPTAIGSEPQDSSIDSKDHWQTCMLGHAASNLIPVIASNRIGMETDEESSINFYGSSFIAGPQGNKITEASRTDEEVLTAEFDLDELEVGRIEWGIFRDRRPELYKMIATYDGDLKV

SEQ ID NO: 53 - protein, 176 aa, Paenibacillus polymyxa
  REGION 1..176: note = strain LU17007
MRHKRIDQTFTHLQTSAEEDQEWGDSRARDMAILGLWDEYTLSAQRLCERMATVTRQIRPSEYETFPTQFEWLEQKETDLIIDGIWSADLHGDHCLFVNIGEHHPEWHTSIEAYIYDTQVIDEGFFLQYLNTSPKATAYATSFRNNGYATMCELLDRYVREGKLERRPFGFKRTNA

SEQ ID NO: 54 - protein, 55 aa, Paenibacillus polymyxa
  REGION 1..55: note = strain LU17007
MNYYPAIFEPLTIRRMTLKNRIVMPPMGTNFAAMDGSFVQDHIDYYVQRAKGGLA

SEQ ID NO: 55 - protein, 606 aa, Paenibacillus polymyxa
  REGION 1..606: note = strain LU17007
MGTNGTTQLRMDNDQFIPGLFRLTEALHSYGACVSVQINHAGASAYAGRLNGVQPVSASNIPSKKGGAIPRPLQKEEIYAIVRKYGEAAGRAQRAGFDCVEIHAGHSYLLSQFLSPVYNKRTDEFGGSAENRTRFARLVIDEIRSVVGPFFPICLRFSAEEFTEGGNTLEDTLELLEYLNDEIDILNVSAALNDSIQFQIDGMNLPDGWRSYMAKAVKEKFGKVTMTSGNIRSPQAAQDILARGDADLLAMGRGLIAEPNWVLKVQNGYEHLLRKCISCNIGCADHRISKSKPICCTVNPDLFKEAEYRKQRVRNSVQVVVIGGGTAGMEAACTAAEVGCKVTLFEEKPELGGLARDIARLPDKTRINDFPDYLIQRTKQLTNLNIVTGTRADMSMISALNPDIIVNATGAQPLLPPIAGLHDQLGKPGTKVFSIFDLLNNMENFQEFEGKRIAVVGGGAVGLDVVEYYAERGAQKVSIIEMMPLLGKDLDMITRISMMKMVEERGVNVHTETALTEVCSDRFKVKHGEQEFEIPFDLGFVCLGMRSYTPLMDSLLQYGKEHQVEVVNIGDSKQARRIIDGTREGRNILKTIQRVDEFKNEFSYSY

SEQ ID NO: 56 - protein, 58 aa, Paenibacillus polymyxa
  REGION 1..58: note = strain LU17007
MTNNSLYIQVEETSVFSAFLIWIYAGKKIDSFVILKVNYGRYKKAISVGGCERESFFE

SEQ ID NO: 57 - protein, 308 aa, Paenibacillus polymyxa
  REGION 1..308: note = strain LU17007
MNHFLSEIPGASAWRNVQEIHKGWSSDSKYFIQTTDGRDLLLRISNITQYDKKQREFESVKKLDHIDNVLMSRPLGFGLCNNGQSVYSLFTWVNGEDAEGIIPTLNAEQQYQLGVHAGKVLAKLHEIYAEQDRVPWAEHYNAKINRYIRNYKSCGIALKGADQTISFIEQNRHLLENRPQTFQHGDYHVGNMVITSSGELGIIDFNRLDYGDPWEEFNRITWCAGLSPLFASGRIHGYFNNDVPDLFFRLMALYIASNQISSIHWAIPFGKEEVDDMVQRAEEVLEGYDYFQTVIPKWYLPLHLSSKM

SEQ ID NO: 58 - protein, 149 aa, Paenibacillus polymyxa
  REGION 1..149: note = strain LU17007
MKKIYRKQEIIDMTIKLLEQTSMYEEQYEQYVRRPFRTDFYDDLSPYVKVGKQGYTLQMYERGVQMLNKLTQDVEDVMYWIIEDTIHIISHLNLLRKYKVDNQNTHLKYTKEIMKELTTAMNNAFYEIGGIYQEWHEANRRATLENPLK

SEQ ID NO: 59 - protein, 327 aa, Paenibacillus polymyxa
  REGION 1..327: note = strain LU17007
MHHMMSKKSYMILCALFVMIFVISGCGNAGSSSDSSAQPASSTKEEAGGESGTRTVSTIKGDVKVPANPQRVVVNWYIGDVFTLGIKPAAVFGWKQETMPFYDKFNGIPVIEKWETEEIMKYDPDLIITYDTKDYDKLSKIAPVLVIPEGKMTSVERLKFLGQATGHEAEADKVISQFESKLSEAKEKLNSDIFKDKTFSIFEDWGSGSYGIYYETGSRGGTLLYDFLGLHKPEKLNTLIKNSGESRGSLSYEVAAEYFGDYVLWFKQEDKESEYAKTKIWSSIPAVKNGHIIEIPAKYAGLFYYSDVASMTGQLDYIIGKLLEQTK

SEQ ID NO: 60 - protein, 341 aa, Paenibacillus polymyxa
  REGION 1..341: note = strain LU17007
MSTHKEQNKKGIFHFVSYMIAGVFLLLVVSAASITFGAAEMSLKLAWGAVFQFDPNITEHQIIHTLRFPRTVADIIVGCSLAVCGAIMQGTTRNPLADSGLIGISSGSTFAIALCMAFLPGRTYGETMLYSCLGAAITTGITYYIASIGKRGMTPQRLVLAGMSISMLFGAFSTFLAIKYEIGQALDYWSAGGTASAKWSELAFISPLFVVGLVCAIALSPSITILSFGEEVASGLGIRANRIKLFSTLIVLILTGLSVIVVGPVGFVGLIVPHIMRCLVGTDYRYIIPASALYGAVFLLAADLLGRMINRPHETPLGIIFALVGVPYFLYLVRKQRREFS

SEQ ID NO: 61 - protein, 335 aa, Paenibacillus polymyxa
  REGION 1..335: note = strain LU17007
MKLSRNSRGISIILLLTMLTLLVAVLSMNVGKMNLSPLEVFKVIIGEGTNKQNLIVFEFRLPRIVLSVLVGIGMGISGCIMQSLLKNDMASPGTLGISSGSGLFVLLYITLFASEGLLSPIILPGLAFAGGLTAAFLIFMFAFRRGRDISPTGLILTGVAMGSGYSALSLILTLRLDKQQYDFALRWQAGDLWGDDWSYIMVLLPWVLIICLYVFYRSNTLNTLNLGNQTASGLGVAIKREFIGLTIAAVALASGSVALGGNFFFVGMVSPHLARRLVGPNHKLLLPTTALVGALVILIADTLTRTISFGADIPTGIIITILVTPYFLYLLSKAN

SEQ ID NO: 62 - protein, 191 aa, Paenibacillus polymyxa
  REGION 1..191: note = strain LU17007
MKVLSVVSHPRKDSLTFKVAGRFVQGLADAGHDYEILDLHGIGFDPVLKGVDEPDWSVAKQSFSPEVEMEIKRMKEHDALAFIFPLWWWHLPAMLKGYIDRVWNNGFAYGSNNLHHQHILWIGLAGVSKEQLKKRNYDEKITHLLNVGIADYCGVSNSKVEFLDETLGSNSRHYEILLDQAYRLGLNYAKD

SEQ ID NO: 63 - protein, 127 aa, Paenibacillus polymyxa
  REGION 1..127: note = strain LU17007
MNEPTKNRVQKKYQVGVEAALEVMGGKWKPLIIYHLMTGRKRSSEFRRLMPGITQKMLTTQLRSLEKDGIVTRKVFNEIPPKVEYELTHYGWGLKPALDHLCYWGEDHLDKIHGDKFKVLEEFQGCD

SEQ ID NO: 64 - protein, 142 aa, Paenibacillus polymyxa
  REGION 1..142: note = strain LU17007
MSVDVYLNFNGNCREAAEFYAEAFGTEKPKIMTFGEAPPNPDYPLPEEAKNLVMHTRLQIDGSNVMFSDVFPGMPFVAGNNISLAIVNKDEEKIRSYFHKLKEGGTVNMELQETFWSKCYGSLKDRFGIEWQLSYDNGMTDS

SEQ ID NO: 65 - protein, 63 aa, Paenibacillus polymyxa
  REGION 1..63: note = strain LU17007
MGGKSKGGGTGRGTGSKGWTRWNKTAKPVKRKSAATGEPGNTAAGAAKGGAAKPIGNRGGRSK

SEQ ID NO: 66 - protein, 230 aa, Paenibacillus polymyxa
  REGION 1..230: note = strain LU17007
MRINKYISETGFCSRRETNRLIAAGRITINGSVCEAGAEVEPLDIVLIDGKPIPINHSEPVYLALNKPIGIVCTAAEQVEGNIIRYVNYPSRIFAIGRLDKASEGLILLTNDGSIVNQMMRSEHGHEKEYAVTVDKPVTDEFTQTMSRGVEILNVITKPCKVDRISEYEFRIILTQGLNLQIRRMCKALGYRVLKLERVRIMNITLDHLERGQWRHLEKEELELLLAKLQ

SEQ ID NO: 67 - protein, 366 aa, Paenibacillus polymyxa
  REGION 1..366: note = strain LU17007
MNSNLTVRQAIMWFALYQIGSAYLVLPAAITAAAKQDAWLSIPVSLGFYLLLIPLYTSIARQIQGKSFVEYLRCLFGPLGGTISIVFIFFFPFLVFIMTLRNLGDFITIAIMPETPPDAIYFIMLIVIYFAVRSGPAVIGRCAEILFFFLLVLYLLVRITLLPESKIDNVLPIFEYGLNPIVLASFNLFAFPYLEAFLYLFFAQYIPDPKKWRKTVITSALISGGMYFLMVLQIIAVMSEGVVSNLTFPTFFINRTISSGEFLQRFEIFVAVFWFVTIFFRLALLLYVSAQGLADAFRLRNANSLLVPLILIAIAMVHSIWPNMQFINKFFSVWPFYAMIFGIVFPIVLWLVGKLGGSLKLRKKYH

SEQ ID NO: 68 - protein, 75 aa, Paenibacillus polymyxa
  REGION 1..75: note = strain LU17007
MLYVILVTSILTSLYEFKKFKEKQYVREIVFSSILLIIGVILIILRIVSIKLPTPLTGIQILFQPISRLLTEMLS

SEQ ID NO: 69 - protein, 402 aa, Paenibacillus polymyxa
  REGION 1..402: note = strain LU17007
MNSYRSTILLLFMCIWLMVFLTGCWNSKELSAISVVMALGIDAVDDQYEVSLQVVDPSKMSQNSPTERTPTIVFSKRADTIFEAIRKLTTESSRKMYMSHLKFVIFDEKTAKKGIKEPLDFLFRDHEVRPDFYLAVVRENSAKEAVTFVAPTEVLPAMDMYKALKISEKAWAPTSAVNVKDLLQKFTEDGIEPVLTGIRLTNLEKGLTIDNVTKSPQHVKYFFTGIGVFKGDRLIDWMDDSQSKAFTYISNRVSSTVASIDCPNSKGKFVVEVIRSKVKIHPEIIDHEPRISLIVDTESNIGTISCNANPKNEETFRDLQESAKEHLQQSLKKGISHAQQIGSDIFGFGEAFHRKFPREWHRWKEDWPQKFQTLKVDIQLNYRLVRFGDITSPIDMGIHNQE

SEQ ID NO: 70 - protein, 474 aa, Paenibacillus polymyxa
  REGION 1..474: note = strain LU17007
MKLHTKFSRQLYRNIELICSFMGNSSDFVVREITTGHKHAALFYLDGMTDMQKVQDNVIRPLHDRVSSDEITLPLLKNAILDIGEASFTQNFENALEQILSGGLLLLLDDMDEGLVISLPGWEERSISDSKTQPVVRGPQEAFTETLRTNTTMVRRRVKDTRVRLTTMKVGEKTKTDISVMYLYGVADPKKVQDMISKLKNMHVEGVLESEYLEECLHDKQLTIFPLFYNSDRPDSIAAGIMEGKIAIFVDGSPFAILAPAVFADFLQSAEDYYQSFVYSSIIRILRYICLAICMLAPAIYVALTTFHQDMIPTVLLLSLSAQREGVPFPAFVEAMIMEVVFEILREAGLRMPRTVGQAVSIVGSIVIGQAAVEANIVSAVMVIVVAITAISSFVIPSYTFAIPIRILRFAFIGTAAMFGVYGLTVGILMLFVHLNGLHSFGVPYLSPFANYKSSEQRDAILRFPYRTKKHRKN

SEQ ID NO: 71 - protein, 122 aa, Paenibacillus polymyxa
  REGION 1..122: note = strain LU17007
MLFITKKLIDKLAEPHRESDMLICYSTPQSFSAYTSRAILLLNNDRIIILFLNLFSTKVVQKVEYEIADLQEQKYHSGHLSSAVWSFKIKGQHSRFRIIKKILTLGSMQRDFLNFLQQNILN

SEQ ID NO: 72 - protein, 280 aa, Paenibacillus polymyxa
  REGION 1..280: note = strain LU17007
MNELLIKSDGIEICSESFGERVHPAILLIMGAQSSLIWWEEEFCRRLADTGRFVVRYDNRDVGRSTTYEPGQPDYTFEDMADDAIRVLDAYKIEQAHIVGMSMGGMLTQMIALRHPDRVLTVTLLATSNFAPDLPPMEEKVMDYFSNMEAIDWTNEQSVVDFVVGRSRILVGSKHSFDENKVYQLAKEEWKRSNNMASMNNHAMLSGGESYLARTGEINVPTLVIHGTEDPIIPYEHGIHLAHEIPGAFLLALEGAGHEIHYDDWDLIIDSISKHTSMPN

SEQ ID NO: 73 - protein, 92 aa, Paenibacillus polymyxa
  REGION 1..92: note = strain LU17007
MSILEDLYYGKWYPRERTKPKKPELELVHQKISVFMKQLRVRLSEHDYELIEELSDLYDVLISILSASDYYSGYKAGALTIIEIIDGINYRN

SEQ ID NO: 74 - protein, 252 aa, Paenibacillus polymyxa
  REGION 1..252: note = strain LU17007
MDYMTYGIPKGMYQGYMERAAKQNDSWNDMLNFGTFGVTGMIQGAFNPTNAWSKEHMANLFGTAGLMIGSTSTKALIKPKNILEGSVKYESTLSKVNILKESEQRSSNIKSNDFNYAETGARNIPPEQFFREEAIAEELYGKFRNLGNQDVEAIAKNTGFSERIQRIKDHVFNNTHTKDHGVGKFDPDFELSQAWERLVDGKYVDSDVQLLHHELFESRFEGIFHTNYRTAHDKTIESGRPWNWEKIYEERE

SEQ ID NO: 75 - protein, 39 aa, Paenibacillus polymyxa
  REGION 1..39: note = strain LU17007
MAVYIIMLKEYEDEERVVYNYGPSEEAMGKIEYDKKMGS

SEQ ID NO: 76 - protein, 64 aa, Paenibacillus polymyxa
  REGION 1..64: note = strain LU17007
MRKFASEIEGIENEITVLSESKQQSWIGLTKRLFLLMRKFIQINGEHLNWESIYKFIYFRYMYI

SEQ ID NO: 77 - protein, 221 aa, Paenibacillus polymyxa
  REGION 1..221: note = strain LU17007
MEISQGVEMLQLDFRGHRIHPILLWDQEMAVLIDTGFPGQMEDLRVAMEKVGVSFDKLKAVILTHQDVDHIGCLPEILQECGNNIKAYAHELDKPYIQGEIPLFKDSHLENPPKGQVDATLIDGQELPFCGTIRVIHTPGHTPGHISLYLKQSKILIAGDSMYSENGILRGIYAPTTPDMNAACLSLKKYLDLDIASVVCYHGGLSNVDIHDQILGLTQEL

SEQ ID NO: 78 - protein, 68 aa, Paenibacillus polymyxa
  REGION 1..68: note = strain LU17007
MLASLQGKEVTIHFIDGTNVCDGILDQIDDKFVKYLTQYQTFVIPITSIRTVSIDIKERQRHRVGFAP

SEQ ID NO: 79 - protein, 194 aa, Paenibacillus polymyxa
  REGION 1..194: note = strain LU17007
MSVYVPYVVEQTAQGERSYDIYSRLLKDRIVFVGATIDDQLANSIIAQLLFLAAEDPEKDIYMYINSPGGSTSAGFAIYDTMQYIKPEVHTICTGFAASFGAILLLAGAKGKRSALPNSEIMIHQPHGGAQGQASDIAISAKRILWTREKATRITAERTGQSFEKVEKDMDRDFYMSAQEALEYGVIDQVITSL

SEQ ID NO: 80 - protein, 241 aa, Paenibacillus polymyxa
  REGION 1..241: note = strain LU17007
MNIEDSVQMTDNTLDIQNFDELQAVLKSYCLSLTKSNWDAEELAQDTWVKALGKLNKFEHTNPKALLMRIAKNTWIDDIRRKAVYTRILNREQAKVTVPDHGSFEIEIALQSLMNHLSALQRTVFLLRDVFGYSIRETSDMLETTEGAVKVALHRARKSLGAVQEELLKGELSLPESEKSKTFLRALTAAYQMGDIATLVMLSYQDVIEPEVMISIVNNKLLWSHVSAKQANFDTISMMAA

SEQ ID NO: 81 - protein, 236 aa, Paenibacillus polymyxa
  REGION 1..236: note = strain LU17007
MIKQKLKIEGIPAILWGGESDKVFIAIHGNMSNKADDVIVIFAEEATAQGYQVISFDLPEHGDRKEETYVCKVQNCVHDLDIIMRYTQKQWHEISIFACSMGAYFSLLAYHHLPLKQCLFLSPVLDMERIIKNMMTWFSVSEDRLKVEKEISTPIGQTLYWDYYCYVKSHPIDTWNKPTAILYGSEDDLCEYDVISTFASRFHCQLKVMERGKHYFHTKEQLQFYRQWLKEHVTAK

SEQ ID NO: 82 - protein, 176 aa, Paenibacillus polymyxa
  REGION 1..176: note = strain LU17007
MSNFLSEFEERFRAGFLEDLKSILEEVKDEKVYACAFGTDSDFVTLFLAVNTEESLVRHITNMKAQDLCNSKEDEIYYRWGLSEYQYGDTAHLNHISKFLYATDNVLDYKDEMIKIMAKVVKETDDVFFTQFGQSKEDIIFFVSMTDDDMAEELEDQSVIQMTNAKLVDGFLHRYQ

SEQ ID NO: 83 - protein, 248 aa, Paenibacillus polymyxa
  REGION 1..248: note = strain LU17007
MIILKSPREIEEMKPASQIVADCYREVVKLIEPGITTREINDFVARHITKLGGKQFTKGYNGFPAETCISVNDVVAHGIPSNQVLMDGDLLKLDIVVEYGGWFGDSCWCYAVGNIRPEAQKLMRVTKECLDLGIARALPGGRLGDITSAIQQHAEANGFSVVRDLLAHGIGRSLHEEPSYEHIGVAGKGTRLKEGMVFTIEPMINEGTFRITIDDDQWTARTADGKLSAQYEHTIAVTQDGPLILTAQ

SEQ ID NO: 84 - protein, 239 aa, Paenibacillus polymyxa
  REGION 1..239: note = strain LU17007
MSPRTKEQNEEIRLRRLAQIRKAAADVFLNKGPLLEIRDVAVQAGLGYGTVYHYYSNKGNLLHDLLWDALERAGGWLETPLEAQPKAPPASASEKTPAGGHFGLAAADSQSGSRETAVATELGPVAAAGVRLLQLWAEDHALYLLHKLAGEGFASLPEGRSAPLSAAFRREVLTPLAALLETDRAADGTAASGGNAAEPPYRLQRTEMLLAALVGCASLSLRRGKLHEEARDIVRFLKL

SEQ ID NO: 85 - protein, 38 aa, Paenibacillus polymyxa
  REGION 1..38: note = strain LU17007
MENLLGLSVTSYTHAKPIIRKALLCMGRNNFLTLNKLF

SEQ ID NO: 86 - protein, 68 aa, Paenibacillus polymyxa
  REGION 1..68: note = strain LU17007
MRYTNATKVLPQKLITEIQKYVQGETLYIPKPKTEYMNWGSLSGGEGCLNSEIPKSEMLFKIAAVSSN

SEQ ID NO: 87 - protein, 338 aa, Paenibacillus polymyxa
  REGION 1..338: note = strain LU17007
MGKIYGEQKSRSRHLIDPEIISAVDLIPTTDLTKSTLMESRKNQSQMMQQLDVTQMFPVTLEKRVVPSYFNGPDIQIEIIKPKQSKHNKMPLYYSIHGGGMVLGSPVVDRPANAALAAEHGFCCVSVYYRLAPEHVQPSQLQDCYSGLKWCIEHAEELGIDTEKVAVGGSSAGGGLAAGLALYIRDQKEFEIHHLRLMRPMLDDRTSIAPEHPYAGEFIWTKQSNYFGWKSVLGVEPGSEEVSEYYVPARAKSWAGLPPTYINIGTVDLFIDEALFFAKQLVFDGVLVELHIYPGYHHMSPAFPNAHFSKEGARTSEYALLKALKIFDINSNEYNTKR

SEQ ID NO: 88 - protein, 110 aa, Paenibacillus polymyxa
  REGION 1..110: note = strain LU17007
MSTSSKPNRLVKEKSPYLLQHAYNPVNWFPWSDEAFEIAKRDNKPIFLSIGYSTCHWCHVMERESFEDQEVAEVLNQDYVSIKVDREERPDVDHIYMSICETMTGHGAGR

SEQ ID NO: 89 - protein, 578 aa, Paenibacillus polymyxa
  REGION 1..578: note = strain LU17007
MMTPDQKPFFAGTYLPKEQKFGRVGLLELLGKVGIRWKEQPDELMELSEQVLTEHERQDLLAGYRGELDDQCLNKAFHEYSHTFDHEYGGFGEAPKFPSPHNLSFLLRYAQHTGNQQALEMVEKTLDAMSRGGIYDHVGMGFSRYSVDEKWLVPHFEKMLYDNSLLAITYTEAWQVTGKRLYRQITEQIFTYIARDMTDAGGAFYSAEDADSEGEEGRFYVWSDSEIKAVLGDEDASFFNDLYGITPYGNFEGHNIPNLIDINLEAYGNKHDLTEPELEQRVSELKAKLFTAREQRVHPQKDDKILTSWNGLMIAALAKAGQAFGDTRYTEQARKAETFLWNHLRREDGRLLARYRDGQAAYLGYVDDYAFYVWGLIELYQATFDVQYLQRALTLNQNMIDLFWDEERDGLFFTGSDSEQLISRPKEIYDGAIPSGNSIAAHNFVRLARLTGETRLEDYAAKQFKAFGGMVAHYPSGHSALLSALLYATGKTSEIVIVGQRNDPQTAQFVQEVQAGFRPNMVVIFKDKGQPEIAEIAPYIHDYDLVDGKPAVYVCEHFACQAPVTHIDDLKAMLDRIE

SEQ ID NO: 90 - protein, 51 aa, Paenibacillus polymyxa
  REGION 1..51: note = strain LU17007
MKGNLSGDCHHRQDEAAHHRLRNSGDEMEMLSNEEVFKGKMEDNKGTQQKF

SEQ ID NO: 91 - protein, 666 aa, Paenibacillus polymyxa
  REGION 1..666: note = strain LU17007
MKKFSREKWKITRVLSKNFKTKLMVAFIAFLIIPSMIVGALSFESASQQIRNQIEESAEQAIIRTNFIIDSTIEPKLHDAEYFAERLKGNRVETEEQAAKLEELFKQYAALHPEAESIYYGTKDAKLTTYPPKQLPDNYDPRIRPWYDEAIKGNTKTAISSPYLSADSKQMTVTVSRATTDGSGVIGIDLKISGIKETLNNIKVGHEGYAILLDSNHTYIVHPTKAAGAKITDIESRMFQSDTGEYEYEYEGQPKYMNYATNKLTGWKIGGTLYLSEVDEAAQPILFSTLLTIVGCLVIGVIIVYFLIRSIIKPILNLKEQAVNVSAGDLTQDIQVMSKDEIGELGAAFQNMQHNLRSVIQNVGNSADHVALSSNELTISAEQTSAASEQVSQAVQEIASGAEKQTTGLENNSVALDEIAQGITRIAERSTSVADLARRSALQAEEGRKSVEQTGEQMNSIHQSVERSNRMIQTLQARSHEIGEITKVIGDISNQTNLLALNAAIEAARAGDHGKGFAIVADEVRKLAEQSQSSATQIANLIGEIQHETETTVETMDRVTTEVKDGLQISKETIVKLNHAMEGIRETTPQIDDVASIAQQISASVQEIAATASELATIATGNAATSEEVAASSQEQLASMEEISASAQLLSNMAADLKVMVSRFKY

SEQ ID NO: 92 - protein, 854 aa, Paenibacillus polymyxa
  REGION 1..854: note = strain LU17007
MVRDLLLYTIVILLLVLIFQRQLIRQAITGVFYGLAGILFFYFGISDSTLLTCVLEIGIGLLFMTLFGQALTPTNYTYGQRLLDKNHDLLTLLRVQPGFTFRLEKRGDEFYYMLLDGELLERMGLNLQVNFNKWEHVKRIGDILELSSETLEQLTEYYKQAWFGDRTVFELEFWEYSALITLHPVRDDGFTRYVIGHVLDITEYKASEQKRKEMSEFNHAKSIFLAHMSHEIRTPLNGIIGLSKLLSKTQLTDVQKDYLHKLLASSRTLLDMLNNVLDFSKIEACKLELERVEFELENMLRHLADTIGTLLEHKEIEVVFITDPELPKSFKGDPLRMEQVLLNLMTNAIKFTDQGHVLLQVKMVGQQDERVSVTFMVEDTGIGISKTGMDKLFVPFTQVSTSTHRYGGSGLGLAISKQLAEAMGGSVEVKSCLGEYSQFYFNVELDIGDLNARNTQLEKPINGKALIIAQHKLVSHSLNELLQDLGLQTLTVSSFQEYADAFQKGEHFDFVMIDMGMKGFRELESWRHWFHILDKQMTQVIGLTTVFQLEEVAAEATEHGVDVFLSKPVTRNALLEVLRFNHEQEKSVSVDHHSLEAVATMNLQYEVGVSTQKYQILIAEDNEISQVVITEFLAERGFEVTIVTNGREVIELLERFSWDMVLLDLHMPEMDGFETARHIRRNRAFNRLPVIAFTADAVQTQQEICLRAGINDVLLKPVHELTVTRILNSWIHLAWLQELHGIHAEKAIAGMDGKVYIFQFALHKWIQEYQYLDKRVVRKMDNGQLSSALRLIHSLKGGTGNLCATELLAKVIKLEKALKRSNETSGGELYPDWREQLSIVQKEINQIKSSIPWI

SEQ ID NO: 93 - protein, 230 aa, Paenibacillus polymyxa
  REGION 1..230: note = strain LU17007
MSNVLIIEDDNMLGDTLSLYLTGEGYNVTRVELATEGIALLDKEQPDIILLDLLLPDLDGVNPCPLIRKHTDVPIIVISTENNISERIRTLTLGADDYICKPFSMQELKARIEALFRRIKITRLQGRNTSPEAEPENGISLDLARRMVIVNGQMVEMTYSEFELMKLFYSNRGIVFSRYALIQALRGTDSFINERAVDVHINHLRRKIEKDPKKPQLIKTIWGIGYKFMQ

SEQ ID NO: 94 - protein, 420 aa, Paenibacillus polymyxa
  REGION 1..420: note = strain LU17007
MNTFETLESNVRSYCRSFPVVFNKAKNDVLYTEAGEGYIDFFAGAGALNYGHNNDFMKNRLLDYLTSDRIMHGLDMYTTAKQEFMESFSERILQPKGLNYKLQFCGPTGTNAVEAALKLARKVKKRNGVFAFMGGFHGMSLGSLSITSNNSMRESAGVPLNNVTFIPYNSTFNGMDTILYMEQLLTDTHSGVEKPAAIILETVQAEGGINIADNEWLRELRQLCDDHDILLIVDDIQVGCGRVGSFFSFERAGIVPDMVVLSKSISGYGLPMSLLLLKPELDIWSPGEHNGTFRGNQLAFVGAKAALEFRDTVGLEAQVKEKEAFVQQFLREHIQKIDPLIEIRGLGLIWGIDVTHLGEAFAKEVATLCFSKGLIIERAGRNDTVLKIMPALTISMENLSKGCNIIKESMAQITSNLVTL

SEQ ID NO: 95 - protein, 172 aa, Paenibacillus polymyxa
  REGION 1..172: note = strain LU17007
MSTLVIVVHPDLAESRINKRWMQELKKQSSVTVHNLYEVYPDEQINVAHEQKLLEQHDRIVLQFPFYWYSSPPLLKKWLDKVLTYGWAYGSEGGKLQGKELLIALSAASVEENYQHGGRNRYTIEELLRPFEATGHMIGVKLLPYFVQYGAATLTDEQLEQSALKYAQAVIS

SEQ ID NO: 96 - protein, 374 aa, Paenibacillus polymyxa
  REGION 1..374: note = strain LU17007
MNKTKRLTQTMDYRTKQARWVRKMLLLYWMIITVHFIVQLGSYLFLDYPASPYEFYVGVLIVPTLIMSGSNLLAELAHFKFSRYSFAILFMASTVICWMIIRLNYDIRIIPALCLLPIFSSILFFNRRLIWFSFALQVIVFFLLLAIDGSFRSYLSDFDIVAIPTFLVMSTFLALIIQASGRDLLVDLYKTKRAQQELMISNAIISKMSMTDGLTKLYNHLSFQNFYEKALEYAEQGAIIHLALVDIDNFKKINDTYGHQFGDKILEGISQIITEQITANDIPARYGGEEFAILMFEHTFEEAYQIVENIRREVEKMTFQEKMQIVSVTVSIGLKSYTEDMNKDKDVFFQETDDYLYQAKRSGKNKIVALDHIA

SEQ ID NO: 97 - protein, 811 aa, Paenibacillus polymyxa
  REGION 1..811: note = strain LU17007
MKYGFFDDANQEYVIHTPQTPYPWINYLGNERFFGLISNTGGGYAFYRDARLRRLTRYRYNNIPVDNGGRYFYIYDDGDYWTPGWMPVKRELEQYECRHGLGYTSIMGERRGIRATQLAFVPLSFDGEVHQVKLQNTSLQTKKIKLFSFVEFCLWNAYDDMTNFQRNLNTGEVEIQDSVIYHKTEYRERRNHYAFFDANRPLAGYDTDCEAFLGLYNGLDQPQTITAGQASNSIASGWSPIGSHCIEITLEPGEETSCNFVLGYVENPEEEKWESPGIINKKRAHAMIAQFADETDVERALSELRSYWNDLLSKYTLQSHDDKLNRMVNIWNPYQCMVTFNLSRSASYFESGIGRGMGFRDSNQDLLGFVHQIPERARERIIDIASTQFENGGAYHQYQPLTKKGNHEVGGGFNDDPLWLIVGTSAYIKETGDFGILDEQVPFDGNVDRAASLFEHLKRSFYHVVDNLGPHGLPLIGRADWNDCLNLNCFSATPDESYQTTQNLEGRIAESVFIAGLFVYTGPDFIELCKRRGLNEEAATAQAHVDRMRTATLEHGFDGEWFLRAYDHYGNKIGSKDCEEGQIFIEPQGFCVMAGIGVKEGLAHKALDSTRDRLETPYGIVLQHPPYSRYYMNLGEISSYPPGYKENAGIFCHNNPWIMMAEAVIGRGDRAFELYSKIAPAYLEDISDIHRTEPYVYAQMIAGKDAVREGEAKNSWLTGTAAWNFIAITQSILGIQPEWDGLRIDPCIPKSWGEFTVTRVFRGDTYVIHITNPQHVSKGVATVTVDGTVLTNNILPVAGDGTIHQVKVLLG

SEQ ID NO: 98 - protein, 244 aa, Paenibacillus polymyxa
  REGION 1..244: note = strain LU17007
MAPITLFFIPYAGGSASVSFKWKKLLLPQIKLVPLELAGRGIRSGEPLKDSIEEMSEDLLHQISQELVPGDPYAIYGHSMGTMIAFELYYKLVAGGYGKPAHLFVSGGRAPHVPRNVPWLHDLPADQFRTHLRRYGQLSEAIFDNQELYDYFMPVLRADFKAVEMYKYMDKDTPLHCPITALTGLTDNTVTLQDAEAWAQHTDQQFRVFTFEGGHFFIHDEVERITNIINESLELSTVTSRIQN

SEQ ID NO: 99 - protein, 88 aa, Paenibacillus polymyxa
  REGION 1..88: note = strain LU17007
MTVGVLAHLFGKLPYRELAAKVGEAGFTHVQLAPWRAISDVDFNKPGKFNPGLASSIAEEFRKHGYPYQCSVVICIFLYRMRNCYVRM

SEQ ID NO: 100 - protein, 216 aa, Paenibacillus polymyxa
  REGION 1..216: note = strain LU17007
MLGCYLHFFVQDEELLRENVERFKELIRYAGLLGAPMVAAEVGRNEDGTPYSERDWRVVKEVVRELADEAEKWGVFVGLEAANDHLVGTAAELATFLEEVPSSHIGVVIDPGNLLKTENLARQDEIIREAFQLLGPRIIAAHAKDRRLSSSGEIETVPPGFGDMNYGLYMELLEQYKPGVHIIMEAAQEHEMAQSKRYIEGHRVAAQKAQQVQTKS

SEQ ID NO: 101 - protein, 122 aa, Paenibacillus polymyxa
  REGION 1..122: note = strain LU17007
MNLLLLLGCIVMFLAVALGAFGAHALKKRLSADMMSIFQTGIQYQIAHGLGLLLLGVLAGNLVHSSLIVTAGWVMLVGILLFSGSLYVLSVSGVKKLGAITPIGGLAFLASWVMVMVAVMQG

SEQ ID NO: 102 - protein, 995 aa, Paenibacillus polymyxa
  REGION 1..995: note = strain LU17007
MISRKSVFRKSVSMVMSAILVLPLSLGLFQAEPDRASAATPESTRFLQMYKQLKDPASGYFSKEGIPYHSVETLMSEAPDYGHLTTSEAYSYWMWLEVLYGHYTGDWGHLESAWDNMEKYIIPVNEGDGKEEQPTMSNYNPNSPATYAAEYPQPDQYPSRLSGQYGAGKDPLDSELKATYGNNQTYLMHWLLDVDNWYGFGNLLNPSHTATYVNTFQRGEQESVWEAVPHPSQDNHKFGKPNEGFMSLFTKENNAPAQQWRYTNATDADARAVQAMYWAKELGYDNQVYLDKAKKMGDFLRYGMYDKYFQKVGSASNGSPIAGTGKDASLYLMAWYTAWGGGLGQSGNWAWRIGASHAHQGYQNVVAAYALSDKDSGLIPNSPTAGQDWATSLKRQLEFYTWLQSDEGAIAGGATNSWDGAYKAYPSGTSTFYGMAYTGAPVYQDPPSNNWFGMQAWPVERIAELYYILAKKGDTSSEQFKMAKQVTENWIEWSKSYVFADERPVTDAQGYYLDAQGKRILGGKNPKVATTAAKGEFWLPSNLEWSGKPETWSGFANHKGNANLHVVTKNPGQDAGVLGSYVKALTFFAAGTKAEKGDYTELGKEAKDLSKALLDAAWGYNDGIGITTKEAREDYYRYFTKEVYIPSGWSGKTGQGNTIPGTDATPSDPAKGGNGTYSSYSDIRPNITKDPQWSYLKDKYTTSWNKQTKKWDKGAPEFTYHRFWSQVDMATAYAEYDRLINGSGPAEPTAPKAPSNVKASAGDAQVTLTWSKATGADSYTVKRSTTSGGPYTTVATVTDATYKDTGVVNETTYYYVTTATNSLGTSPDSAEVSAKPTAAPIPAKGDVIAQYRVGDTNPGDNQIRPLFRVVNKGKEALDLKNVKLRYYYTVDGDKAQEFHCDYAQLGSSNIQGRFVKLDKAVNGADYYLEISFGAGAGSLAAGENTGDIQIRMNKSDWSNYNESDDFSYDATKTSYTDWEKAPLYINDKRVWGLEP

SEQ ID NO: 103 - protein, 167 aa, Paenibacillus polymyxa
  REGION 1..167: note = strain LU17007
MNDNLAQALNEQMNFEFYSAHVYLAMAAYCSSESLDGFANFFLVQAEEERFHAMKLYRYINDRRGRATLAALPEPKNSYDSMLDVFEHGYKHEQQNTQKFYHLADLALDAREHATIHFLKWFIDEQVEEEALFDSVIQKLKRIERDSNAFYMLDSEFAKRSFVAPAE

SEQ ID NO: 104 - protein, 182 aa, Paenibacillus polymyxa
  REGION 1..182: note = strain LU17007
MSEIYRLARQEDAERLQYVTYEAYETIRQLELKWPAAQADVALIQENIKNNDCYVLEVDGVIQATVSHLKNRALNFITDLPFVMWFAVDPAAQGKGYGKKLLNWVEQTVIRDKVGAPAVTLATAEKHPYLLSMYERWGYERIHAFDHGTGDGTMHLLRKVVNPELFSTYIHEKNEAETAHRN

SEQ ID NO: 105 - protein, 675 aa, Paenibacillus polymyxa
  REGION 1..675: note = strain LU17007
MSNSQSGTTKRRIIAEDLYRFHWVSDPAVHPTSGEIAYVEQCINKERTDYNSAIWLLPFEGEAPIPFTYGPKDETPVWSPDGSQLAFLRSTDGKRQVWIIPARGGEARRLTHVENNVRSLSWSPDGAYISFVAKTAENQSSSTCDVGEQETHLEGRVVNRTKAKSDGYGLWDDTRDHLYVTDVTSGHTVQLTSGAYDVAEPVWSPDGQLILFVARIAEHSKEDTDLRKQNDLFTIAPASSNGNAAAPFKLTHSELQIESAAFSPDGTMIAFYGHDRHAKGATQTRLYTVASSGGAAVCVSETLDAHLGNAGMSDMRSHLHVGPPRFSADGQSLYTLVTIEGNVHVYQFALDGTFKILTQGEREIYQFELTSDEQHIIAASTDVALPGDLFRIAIHSGNEERLTRVNDSLLDEIEISVPESFWTEVEDGRRVQGWVMKPAGFKEGGSYPAILEIHGGPHAMYSNSFFHEFQLLAAQGYAVIYTNPGGSRGYGQSFTNVVLGDYGGRDYTDLLSAVDEAIRQFPLIDPERLGVTGGSYGGFMTNWIVGHTDRFRAAVTQRSISNWLSMYGVSDIGYSFTEDEVGGNPWDDFELLWRQSPLAYVQQINTPLLILHGEQDLRCPIEQGEQLFTALRRLGKPTQFVRFPASSHELSRKGHPQLRVERLQRITDWFVQHKI

SEQ ID NO: 106 - protein, 367 aa, Paenibacillus polymyxa
  REGION 1..367: note = strain LU17007
MAEPLKNMYTEEFLRLFGERVQAAYSPFDIEGFIHQVMDKKWDELELKERIRRISLTLGAFLPSSYEEALFILFAIDEYCSGFPYLFFPDFVEVYGQGEEHWDLSMNALERFTSKASAEFAVRPFLLREPERMMRQMTTWAAHPSEHVRRLASEGCRPRLPWGQALPVFKRDPAPVLAVLELLKADPSLYVRKSVANNLNDIAKDHPDIVIATAQRWKGAHPDTDWIVRHGCRSLIRKSIPEVMAMFGYADDTDGVPLVAAASLTTDPIVLKIGDHCELSYVLQLREGESVRVRIEYGIDFVKARGQVSRKLFLLSDKTVSGGTRLTGTRTHRFADLTTRRHYAGAHRIVLLVNGQEVASTVIDIEM

SEQ ID NO: 107 - protein, 529 aa, Paenibacillus polymyxa
  REGION 1..529: note = strain LU17007
MTDQQQWLAPEYYNMTSEMEHHEAGKTALKWLSETGEYEEITYGELLKKANRLAGGLASLGFNKGDRVLVVVPRRIIAYVIYLACLKLGLAVIPSSEMLRAKDIAYRLRHSEARAVIAWTDVTSEVDKISDDLPALDYRIVVPGDRTVGAQGWLVLDELMEGQEDIFEAVKTHRDDMAILAYTSGTTGNPKGVVHSHGWGYAHLRITSPWLDIRASDIVWATAAPGWQKWIWSPFLSVLGNGATGFVYNGPFRPGRYLQLLQQYGVQVLCCTPTEYRIMAKTAGLDQYDLSRLRSAVSAGEPLNQEVINKFQEQFNITIRDGYGQTESTLIIGNLRDVPLRTGSMGKSIAPGLVEVVDEDGIPLAPGQVGDIAVRADLPALFHTYYHDPERKLASVHGDYFVTGDRARKDEDGYFWFEGRGDDIIISSGYTIGPFEVEEALMKHDSVQECAAVASPDEVRGHVVKAYIVLKAGAEGSPELVKELQHHVKKWTAPYKYPRKIEFIQELPKTSSGKIRRVELRELEKQSSL

SEQ ID NO: 108 - protein, 410 aa, Paenibacillus polymyxa
  REGION 1..410: note = strain LU17007
MSTFESLLEQYAELVVRVGVNIQPGQALLVTAPLETVEFTRLIVSKAYEAGAKYVQVEFEDDSITRSRFEHGDEASFDYYPAWKAEMMEKFAEEGGATLTIKVPNPDLYQGIDPQKVSRATKAAATAREGFSKYTRNHKISWCLIKAPTKAWADKVFADVAEEDRIRVMWDTIFQMNRVDGSDPIQNWQNHLKNLEQVQDKLNHKKYKSLHYRAPGTDLRIELADGHIWRSGGGENGRGDYFVANMPTEEVFTMPKRTGVDGHITSTMPLNLNGQLVDRITFTFKDGKVTEYTAESGEQHLTHLLATDEGASYLGEVALVPHDSPISNLNRIFYNTGIDENASCHLALGSAYPFNIENGTQMNREELLQNGANVSLTHVDFMIGSAELDIDGELQDGSKEAVFRKGNWAI

SEQ ID NO: 109 - protein, 196 aa, Paenibacillus polymyxa
  REGION 1..196: note = strain LU17007
MSHPDKKQQTKEKILQSTLKFIQKEGFEAVTIRKIADLSSTNISLVNYYFGSKENLLSEAIEVILNSFQHTFSVLDNTAMPPRDRLKQFLFNYLQVIRQYPELLSRIIVMGSTPFTSQHEYGRFLNMMGFPKVQNTIKELTGEQQPERLLAMMLQIFGAIFLPALMSPILESGAVVEMPTIEEQLNLLFERYFDQK

SEQ ID NO: 110 - protein, 208 aa, Paenibacillus polymyxa
  REGION 1..208: note = strain LU17007
MAFLRKYWQDAGAIIGVAVCIVLFLNPAMFSDVSGILWLNFVNILFHQFEEYRWPGYFAGLFNNILFKSEAPDHYPLNPNSAMIINVAIAYVFYLLPVWFPHVIWLGLAPVLMGFFQVVWHGIVVNLKAKTVYNPGLCTALLLHVPIGIWYIHEIVKRDIPTAIDWIAGTIYFVFAVYIFIIKGNIWLKESDSPYAFSKQQLGIYDRR

SEQ ID NO: 111 - protein, 275 aa, Paenibacillus polymyxa
  REGION 1..275: note = strain LU17007
MVCTQEQGKSDLIMKPTHQSRNRKKLACKLVTTSALLAIGFAVMTGCGNSGEANSTAPSTTKSATPSASNSTDQNTDINTNEQDTHNNKTSTDSSKPSTDGGNSEKPGKESGQGSTSIHKEPASSTASPDSKHSSAAAILSAAKQGTLPNLPKGLGLGTSSDLLFELWGKSDSGSTGPMRSYAKYHTDLVLDGNDKVTEITSSDSKYKKLLIKQVIDELGQPTETVDTSRDISGTAEANYKIDNTSGLSYYLVFSYQTKTQKVSYVRLYFNSMTP

SEQ ID NO: 112 - protein, 175 aa, Paenibacillus polymyxa
  REGION 1..175: note = strain LU17007
MAKATSTSINRQKEIISAAIEVFAEMGYYRATTAKVAERANISQPYVFRFFATKEALLIEALKVSFARIIDSFHRVIQSASSEQLEQELIAAYSQIMTEYRNEILLQMQAQTIREDVVVTVMQQGLREIHTTVYDAFRQAGIEQALERTMLFLARGMLCNISMSLDLPELMKTDD

SEQ ID NO: 113 - protein, 196 aa, Paenibacillus polymyxa
  REGION 1..196: note = strain LU17007
MSLTSHIEADQILDCKGLACPMPIVKTKKAMDELLAGQIMEVQVTDKGSLADFQSWAQGTGHQYLGTFQEGVVMRHYLRKANPTDVKEEQAFPSTISHKELQAKWFAKENFILLDVREPAEFALQHIPESKHIPLGELENRLAELNLEDEIAVICQAGARSERACRLLADKGAKNVKSVLSGMSGWAGEIIGYDSI

SEQ ID NO: 114 - protein, 158 aa, Paenibacillus polymyxa
  REGION 1..158: note = strain LU17007
MSTAKTTIILFSGELDKALAAFIIANGAAAYDHEVTIFFTFWGLNILRKDELMRTHKGMLEKAFGWIMPSGPKKLALSKMNFVGLGPQMIKHVMKKHNALSLPELIELAQEQGIKLVACTMTMDLLGLQQEELIDGVEYAGVAAYLGDASQGQVNLFI

SEQ ID NO: 115 - protein, 88 aa, Paenibacillus polymyxa
  REGION 1..88: note = strain LU17007
MDYNYSDELKTRLRRIEGQVRGVLRLMDEGKSCKDVVSQLSAVRNASDKAIAQIVAENLQRCILEEQEAGGDTDKLVKEAIQLLVKSR

SEQ ID NO: 116 - protein, 228 aa, Paenibacillus polymyxa
  REGION 1..228: note = strain LU17007
MEVFVTIGVKLIISFFGLWLITFITGRKTLSQLTPLDFLTSLVLSEIVGNTLYDDKVTIWHLLFALALWCALAYFFEKATTHFVKFGYMAEGRTVLLVDKGQVNQELLEKYDIEFTQLLSMLRQQNIFSLREVLYATLETNGSLSVMRKPEYEPPAAQDMGIDAQPDFFSVTVIDKGRLLNESMRGKTIDVELIKAKTREQGYDSIDEIAYAELSEDGTLHIVPMKEK

SEQ ID NO: 117 - protein, 368 aa, Paenibacillus polymyxa
  REGION 1..368: note = strain LU17007
MRQNTIRVSELIICMSLFEVGSTTLFLMGAEAKQDAWLVMLIGALAGLLLLMLHLAIHHQDPELDLFMLFRRYTGKYVGTLINLLFVMYFTYEASRNIRDLGEVTVMTLLRQTPLWIIILITIVVVSNTVRYGYKALFLLCLFLFPFFVLGYALISILIPATGLFHLENSLPVLEEGWTPIFKAAIPELISFPFGQTVLFLVFYPLAYKGRNLTKPVFFAYIMTALALTFVNQLEIFVLGPKIAANSTLPLLEAVQLIELADLFERMDALFTLLLFLGLIIKMSLFFNGAVIGLEKITGVGFKKWILPLAALIYGLSFLSPNYIHHMVIGRKFVLNSWFPVFQIFLPLLLFAFIVIKKRKKTNKQSSS

SEQ ID NO: 118 - protein, 399 aa, Paenibacillus polymyxa
  REGION 1..399: note = strain LU17007
MVRQLRVSYVLFIAGLLLTGCVDRTELNELAITTATGIDGHKGDWINTYQIIIPSAMTTGSGGTSSGASQSAVHTFSTHGKTLRETVTKSSLEYPRKLYFAQNNILVIGKKAAEQGIEEIIDIYLRNLDSRETVKVFIANGEARNFLKKLVPPEKIPGQALEKIIERDSKLASIYPAISMYEFISKISSDSAAGVPEISLEGSEPEKLDSVDVFKETSAKNKLKLSGLSIFQKDKRVGFLNEKESIGVSWLNNQIKNTTVNYVDGNVTSAFLIRKAKVKVTPIKNLNHYYLNVDVKATGDLLSASSQREMKDMQSVGQLQMQAAETIKLQIQEGWKALQQKNIDLIGVGNKIHHKYPKDWKKIKETWPEEFANMDIKIGVKMKLARPGLFEKSFNELLK

SEQ ID NO: 119 - protein, 539 aa, Paenibacillus polymyxa
  REGION 1..539: note = strain LU17007
MLTRWIRSVLKPGKRYTQDIEKSKQQTATDPIHSSLSHTLSLLKLKLGQGPDFVIRDFSESPVHAGHLAVCYIEGLIDQNLLSDLMESLITEMGSADTFMFKENTAASLLKNTIPSGNIQMIHSQNEVYQAILSGNAVIVIDGNNYALVVSIAGGVRRAIQEPSTQTVVRGPKEGFTEDISTNITLIRRKLRTPDLKFESHVIGRYTQTKVMLAYIENVANPEVIQEITKRLQSIDTDSILESGYIEEFIQDEPLSLFPTMLNSERPDTVAGSLLDGQVAVLVDGTPFALIAPVTFFNFFQTAEDYYQRYDISTFLRALRVVSFLVSLLLPSLFIALTTFQQEMIPTTLLITLMAQREGTPFPALLEALMMELMFEVIREAGVRMPRVIGPAVSIVGALVIGQAAVQAGLVSGAMVIVVAFTAISNFVIPYFAMASAVRLLRFALMLLAGALGLFGILIGIIPLLIHLVSLKSFGVDYFVPYSPTFKTNMKDLIIRVPWWAMKTRPSEKSGHNQTRQAAHQYPASSDDTEGGHKPDTQK

SEQ ID NO: 120 - protein, 385 aa, Paenibacillus polymyxa
  REGION 1..385: note = strain LU17007
MSFSDELICFGFEDRLGYFAKAAVPPIYETAPFFFDTYEDYAEAANHEKEHYVYSRGTNPTVRIAEQMIAALEGGEDCKCFASGMAAISAALMCSLSAGDHLILVGHIYETSVSLAKYLTKFDINYTIVHSTSTKAVANAIQPQTRAILMESPTSFTFDMVNIQEVASLSKAKGIRTIIDNSWATPLFQKPLEWGVDIVVHSASKYLGGHNDLIAGAVIASKEIINRMYAEEYELIGGSLAPFEAWLLIRGLRTLPLRMEAHQRNALLVARFLSDHPAISKVNHPGLPSHPQHELACRQLKGYAGLFSFELKDSGYEDICRVINKLRLIRIGVSWGSMESQVISPNYGFNKQSLKKQHMPKSLIRLAVGHEPAELLIEDLATALS

SEQ ID NO: 121 - protein, 98 aa, Paenibacillus polymyxa
  REGION 1..98: note = strain LU17007
MLSALIPSVHSYPAVLLAEQLVHQRYVHPGPLVLRTAPLKFPTPTTDRDRTVSRRSEPSSRTALMGEQPNPWDLLQPQDAMSRHRGAKPPRRCGLLGR

SEQ ID NO: 122 - protein, 212 aa, Paenibacillus polymyxa
  REGION 1..212: note = strain LU17007
MSTYQTVISDGFELKYTIRGNGKPILVIGSSVYYPRLFSDHLYKKFRFIFLDHRGFAKPTRALKPEDYTLDKVINDLETARRCLHLDTFIILGHSGHAFMALEYAKQFPGYVEKVVLLNSAPTNSQERQRQSFSFFYETASPERKDRFEKEIALLENDIKREPDRRFVHMCIRMGAQSFYDYTYDAAYMWNDVHTNMPIIDYLWEKPSERWI

SEQ ID NO: 123 - protein, 73 aa, Paenibacillus polymyxa
  REGION 1..73: note = strain LU17007
MDLIQSLADVDKPVFIGLGRSDYLVAPVSLWDRVDDSYTNVKKVVFEHSGHNPMFEEPHYFDQTLTEWINENH

SEQ ID NO: 124 - protein, 240 aa, Paenibacillus polymyxa
  REGION 1..240: note = strain LU17007
MKYEIILFDVDDTLFDFKMAESHALHNTFAQFGLPQGATEYKSSYDEINSSLWREAEEGLITSAQLRVERFKRLFTVHKLDFNPDAFSAAYLRYLGEGAFLMDGAVELCDVLSECRLAIITNGIKEVQTSRIQLSPLRHVFEQIIISEEVGYQKPQAEIFDYAFTKLAISDKSKVLMVGDSLTSDIQGGNKYGIDTCWFNPSGKTNTSGIQPTYEIASLMELPSSVLSMPPVLNHTSLEY

SEQ ID NO: 125 - protein, 757 aa, Paenibacillus polymyxa
  REGION 1..757: note = strain LU17007
MNIHVNEALGLFHLQSKDCSYIIQLVEGYPAHVYWGAQLHHDQSLASILELRERCSFSPTPDSSSRTLSLDTLPQEYPQYGTSDFRQPAYQVALADGTRTTELKYSGYRIEPGKPKLEGLPSVYTESDDEATTLLLFLEDQHSGLKTTLLYTVFANHSAIARSTLFEHKGSAVMNIEHAMSASVDFADSNYQALYLSGAWVRERHIQRRDLGPGAIRLESRRGSSSHQMNPFLALLRPDATEDRGDVYGFSLIYSSNFVAQAEVEQFNQTRVSIGINPFDFSWRLEPGQSFQTPEAVLVFSEEGLGGMSRTYHRLYRTRLCRGTYRDKERPILVNNWEATYFDFDADKIEAIAKEAGPLGIELFVLDDGWFGKRDNDNSSLGDWFEDRRKLPGGLTDLAKRVNEQGLQFGLWVEPEMVSPDSELYRTHPDWCLHAEGRRRTEGRSQLVLDLSRKEVCDYLYETLSSVFSIAPITYVKWDMNRNMTEIASATATSERQKEIAHRYMLGLYDLLERLTSRFPDILFESCSGGGGRFDPGMLYYMPQTWTSDDTDAIERLAIQYGTSIVYPASTMGAHVSNVPNHQVGRNTSLAIRGDVAMSGNFGYELDLTAFTNEEKELAARQIAQYKEIRSLVQQGDMYRLLSPFEGRGDTAWMFVSEDQSEAFVAYFRVLAEPNGPIRRLTLKGLDPAKKYIIETGATGNTSDPINTSTEDGVSPFRLAFDGEIFGGDRLMKIGLVVSDLTGDFASSTFRLKAISC

SEQ ID NO: 126 - protein, 332 aa, Paenibacillus polymyxa
  REGION 1..332: note = strain LU17007
MATIKDIAREAGVSAATVSRVLNNDLSLSVSPDTKNRIFLIAEQLGYKPSRLRQLKRNTERAGKTVALLLWCSIEEERDDPYYASIRRGIELRCEELGLTLGQTLRGRSSLGTLQKADGLIVVGGVDPEEVSKLYPDKNTIVLVDQYHEQLEYDSVRLHFRQAVDQALGHLLELGHRQIGFIGGKSDGERRAHYFERFMRERGLYNPQFVRVGAWSTADGYLMMNELLAEQERPTACFAASDPLAIGALRALHGHGVKVPEDMAVVGFDDIEMAAFVQPPLTTVRAYPEQMGKAAVQLLSERFEGREPPAYSVIGTKLVIRESSCLNSKINS

SEQ ID NO: 127 - protein, 602 aa, Paenibacillus polymyxa
  REGION 1..602: note = strain LU17007
MNILSLARKWFGRLRFKSKVIAVFLPLIIISLLILGLVSNQLFSRSLIEQTTSNVVDESQLILSRTDYIFSSVETAANIMVTNINRMYDSYGARPDTAMDRVQFGNLMQSRLSIDLSIFREVDAAVFIDTEGTIFASYTESGDDSKVDSMLKRVRESESYGQALWFDMEKRDFLTPDPNSPVLTLGKMVINIDTGDPYGTLFLLVKEEGLSDYFRSSDPDTNKSYYFLDNEMRVAVAEDNGMLMKPVSSQLAEAIQGCGSNVSPKTCSFEDGGNLVTVNDYNRMGWKLVNIVSLSLLTADVRQNVRLSLLIGVFCLAFSWLGASFLSKMVVSPLEQLTRAMRKVVTGDLQSVATVRTEDEIGTIAEAFNFMIRRIRELLDEVRQEQNRKREYELALMTAQIKPHFLYNTLDTIYALNELDRNDEARDTTKALADFYRMVLNKGRELIILEKEAQITDDYLTILQIRYPDVFRYEVDIPSELAGTPIPKLSLQPLVENSIYHGLKKKGTKGFIRIFAFKQNDRVIVRVEDNGVGMNEVQVQNIMSRHLPKEGIRSIGTYSVQQRLSLYFGEEYGISVQSVLGEGTIVDLSLPTLPKGSEHQDV

SEQ ID NO: 128 - protein, 368 aa, Paenibacillus polymyxa
  REGION 1..368: note = strain LU17007
MYKVMIVDDEPLFRDFLRIKIDWESHGFRVCCEARNGREALQEAERHQPHLALVDINMPFIDGIELAQRLKVKFERIVIVFISGHNEFEYLQKAVRTGVQDYLLKPFNAEEMLSMLERIKPKLPVLPQESESAELRGQGGEALHSRAGMPDLGHLRDAVVLDLRMKDSETLEEVRKAIRQLSKYNWGDEYADAMLMGIVSLALSFASERGIPYDQLWENGGDNSPYERLRELDSWEAAEGWMLTLYRKLIQLMENMRPTKASNLFAAAINYIEEHYADSELSAEQVSCGVFVDPSYLRRVFRKESGFSIVDHITHIRMKKAKELLLKGNRKLSEIAESVGYSDPNYFSKCFKKRFGMTPTEYEQLKKR

SEQ ID NO: 129 - protein, 433 aa, Paenibacillus polymyxa
  REGION 1..433: note = strain LU17007
MKKNLRIWSSALLVLTMSVGLVACGEDNSASSNNGSGDGTIKLKVYAQHFDDDTIKPFDYAVEELKKKMPDVEIELDPAVQDGGQKLKTYAATGNMPDIYLADWPVLQTFAKSKNVEVLDNYDTTAEFKKNLNPGVESRLVAPDNHVYAYPETGIEFQMIYYNKSIFEKVGIKTPLKTIDQMADAAKKLKAAGYVPMSIFAKEKWITTAFYNGLVTREQPRGFGALEEKGVKALPEAFVTAAQQMKQLQRAGLFDANATNTNYDQASSLFYQGKAAMFVNGQWEIYSSQEKLGDQVDWMYWPAKDEATYENSKYFIDGSGSPQGYAVSANSKNKETAVKVAAFLASKSAEYRYSQLGSPIVPVKVDKPMASNVPAMMQRVVKELLPNAQEYAQLLSNTKIQNTINDNTQNMMVDNFSENDFVSNLNNTLNKEN

SEQ ID NO: 130 - protein, 208 aa, Paenibacillus polymyxa
  REGION 1..208: note = strain LU17007
MNKYLGNKPALALFLLPALILYSVILIYPVLQTVLRSFYDWDGLSTLTFSGLNNYRELFSDPLLATSLKNGLIFAIVLAVFQIGLGTILALICADPRTRGRKILKTAYFIPVVLSVTVVCQLWIAIYDPTNGLINRLFDLLNIPYQQNWLSSPTTSIIAIAFVNAWQFMGYQFSLLYAGVKSIPRTTLRLPRLTVAANGKRICMLRFL

SEQ ID NO: 131 - protein, 61 aa, Paenibacillus polymyxa
  REGION 1..61: note = strain LU17007
MLIMTNGGPGTTNYTLTFMIYRYAFMESNYGYACAVSVLLVLISLLATVVINKLFDRGQTA

SEQ ID NO: 132 - protein, 280 aa, Paenibacillus polymyxa
  REGION 1..280: note = strain LU17007
MSKTALSKFRHAALQIPLWLYLIVSVYPLFWMVSYSLKNNDEIFVSNPFGLPTHFRYENYINAWTQFNIPRYFLNSLVVSTISTLFILLLALMFAFAVARMRWRFRSTVRTYMTIGMFMPLQVIMIPLAILVRDFNLTNTYGALILPYIAIGLPFSSMIFYGFLTGIPKEIEEAACMDGANIYRLFLKIIVPLALPAIATVAIFQFLNNWNEFTLAYILISDENMKTLPLGLLFFQGSYSTDWGAMGAVMTIASLPMVLVYLFLSEQVERAMTVGSAVKG

SEQ ID NO: 133 - protein, 533 aa, Paenibacillus polymyxa
  REGION 1..533: note = strain LU17007
MTRNQRLRKWSTILLTVPMLTMFTSGAMAEQDMNGHKPPNSAGSGVFYEIYINSFYDSNGDGHGDLKGITQKLDYLNDGNPRSGKDLQVSGLWLMPLNPSPSYHKYDVTDYYQVDPQYGNLNDFRTLTKEAKRKGVKVIIDLVINHSSSEHPWFKEASANPQSKYHDYYVWADENTNLDEKGSWGQQVWHKNPNGEGYFYGTFWSGMPDLNFDNPEVCKEMIKVGKYWLQQGADGFRLDAAMHIFKGQTKDGADKNIAWWNEFRSEMEKINPNVYLAGEVWDKPETIAPYYESLHSLFNFDLGGTILNSVKNGQDQGIATFAEKTLKLYKSYNRAALDAPFLSNHDQTRVMSELGGDVRKAKLAASILLTLPGQPFLYYGEEIGMKGEKPDEFLREPMRWYKGEGLGQTKWEEPKYNKGEVSVEAQLRDNDSLLASYRTLIRLREEHEALRSDNLEPFQAGSANVAAYKRSSGKETLYIYHNLSGEPVTLQMKDWDKQKRKVVFSSSKDLKVKKDTVKIPAYSSLITKEDRKS

SEQ ID NO: 134 - protein, 354 aa, Paenibacillus polymyxa
  REGION 1..354: note = strain LU17007
MKMDNRKYNVVIIGYGGMGSYHVQLIEPIEQLAIGGVYDIVDYRMELAAAAGYKTYASLEAVLGDQDVDIVLIATPNDVHKEIAIQALQAGKHVICEKPVTITSADFLDIVEVAKQENRLFTVHQNRRWDEDFRIVKDIISKKTVGDLFHLESRVQGANGIPGDWRQLKAYGGGMLLDWGVHLLDQLLQITDSQIESVTATLSYILGTEVDDGFTSLIEFKDGLTAVIEVGTTNYVKLPRWYIKGTEGTAVIKDWDLSGEIVTRNPDVAHVEPKPIQAGQGLTKTMAPPSEESTLKFPIEKIPAAAESFYENFVSTIEGKAELAIKSEEVHRVLVLIETIFEAAATKSVIRRSI

SEQ ID NO: 135 - protein, 173 aa, Paenibacillus polymyxa
  REGION 1..173: note = strain LU17007
MMGILSGNPKDEPMHYGEISGVWQFSLAAKGALSFYQAFLNHAGDKDLRKILDALIDQAKLEIKECDTLLTDNGIAPAPALPERPPVKLEDIPVGARFTDPEIAAKIASDTSLGLVACSQVMGQSIREDIGALFAKYHATKTALGVKILQMSKEKGWLIPPPLQVKRPEAVEV

SEQ ID NO: 136 - protein, 87 aa, Paenibacillus polymyxa
  REGION 1..87: note = strain LU17007
MKKQIVTAVTSICLFAALATPSLAQSPNVNAANDPAQNPYQSNNPTYNANNVRANAVDNDNDMDWGWLGLLGLIGLAGMRRKVSDHK

SEQ ID NO: 137 - protein, 142 aa, Paenibacillus polymyxa
  REGION 1..142: note = strain LU17007
MHNNNTIEFLNIWLSLTKLQSNINDELERALQENYSLSLNEFLVLYFLSQTEEKKLRLQHLQEMVGLSQSALSRLVVRMEAKSCGALQRHICEDDRRGIYTSMTDFGEKKFDRALETFNQILESVLSKDELKQKLQSLIEKI

SEQ ID NO: 138 - protein, 340 aa, Paenibacillus polymyxa
  REGION 1..340: note = strain LU17007
MKDLFSAYKFKGLELKNRVVMPPMCQYSVEKKDGIATDWHFMHYVSRAIGGTGFIIIEMTDVEPDGRISDFDLGLWSDEQIPALKRIVDACHSYGAKVGIQIAHAGRKAEDAEVPVAPSAIPFDEKSKLPRALSTQEVKEMVEKFRGAVARAVKAGVDAIELHGAHGYLIHQFHSPLTNQRDDEYGKDLTKFGREIIQAAKAEMPEDMPLIMRISAKEYVEGGYDIQESISFAKEYQQAGVDIFDISSGGEGPIAAWGRPGSHAAYQVTLAREIRQALEVPVIAVGRLDDPILANAVVGNEDADLVAVGRGMLRNPYWALEAATNLKKETTIPKQYTTGF

SEQ ID NO: 139 - protein, 350 aa, Paenibacillus polymyxa
  REGION 1..350: note = strain LU17007
MKKTHTSDHIKIPPGFWTGLHELGISAHDVAHKARLPLNIMTEPVVTPAQYFAIWQAYSDLIGDTAKGIIKLATVFETTKYPPTVLACYHARNYRDALNRMARYKQLCPPETLRITEEGEHCTIELEWLYTEQPGPPMLVGITLACLLELGRRGTGQPLTAQLVEFSQSMGDVQALEAYFGCRIRIDAKCNRMTLHRRDLDLPFVSYNEELLEILTPVLDRSLAEQQRNCSITEMVKWIIKRSLTGGRPDIEAIAKELNMSDRTLQRRLTDQNTNFKHLLTQARHEQARKYLADPSLDIKEVAFLIGYEDQNSFYRAFRLWEGDTPLNWRTKHLAANSISEGQLGRPSIH

SEQ ID NO: 140 - protein, 264 aa, Paenibacillus polymyxa
  REGION 1..264: note = strain LU17007
MDMSLNNKTALITGSTKGIGKAIAIELAKEGVNVLINGRNYDEVEQTVNEIKSKFPTTSPQNATADIVDKEQRKALFEKYPEVDILVNNMGIYEIMQYEDVDDEVWEKYFRTNVLAANGLAKFYLSKMLKNDYGRIVFIASEEAIMPSGQMPQYCMTKSMLLSLSKSLSKLTRGTEVTVNTIMPGPTLSENVHQIIEGIYTNENMTFSEKEKQFMAANLPQSEIQRFIRPIEIGRLAAFVCSPYASAFKGSPIRMDGGMVPTIF

SEQ ID NO: 141 - protein, 461 aa, Paenibacillus polymyxa
  REGION 1..461: note = strain LU17007
MSVRSWWLMISVGLGILLNPLNSSMVSVAIPSLQNVFQLDFTGVSWIIFSFYIASSIAQPIMGKASDLFGRRKMFLIGLVVAFIASLLAPLSPTFGWLIVFRIVQSIGTSMMVGVGMAIVRIHITEKQATALSVLSIFLSGAAAIGPFIGGVLVHWWNWPAIFFINIPFVVASFLLAWRTIPKDESPTSVARNMSFRKWFDLIDARGILLFTLGLVALLVGLLSAKSSGHISLENVIVGLIGLVALGAFVRYELKATSPFIPLRTFAKYPALTWVNVEFMFVNVLYYSLFFGLPSYLQVVRHVSEFQTGILMLSLGLCSLAASPIAGRWIDKSGPRPALLVSAILMTLGSVWLVTLNPTSPVISVCLALAAFGISNGLNNVGMQAALFQSSPKEIIGVASGLFNTSRYLGTIFSSLLIGIVMGGKFSFEGFQVLGIVLTVIALTLVFMSRRRLDSGQLRES

SEQ ID NO: 142 - protein, 292 aa, Paenibacillus polymyxa
  REGION 1..292: note = strain LU17007
MELLQLQYFLTVAHLEHVTEAARSLHVTQSSLSKTIQRLEEDLGVPLFDRTGRKLRLNEFGSRFLYRAERALFELEQGKQELSDLSSPEHGTLELAVTTASTLPGILREFRRKRPYIQFHVQMLTTQEMVTLLHRGEVDFCLSSPPVEGDDIECKIVCIDPILVAVPKGHRLADRNSVSLTELREEWFVGVKRGYGTRDLVDSVCMSEGFVPNYVYEGDEPARLSTLVEAEIGIAFIPSTARNSQEHLKYLQVENHELIREIALLWNRNRYISRAAQEFREIVVEYFATNSK

SEQ ID NO: 143 - protein, 457 aa, Paenibacillus polymyxa
  REGION 1..457: note = strain LU17007
MEKSIEKRIPKSLIWLCVLAFFSVLNETVFNVSLPDIAAQFGIKPSAANYVNTSFILSFAVGTAVYGKISDIYGVKKLVLISMMIYSGGSLFGLLFHAWFPILLVARFIQGAGASAVPGLIMVIVTKSIEKQHQGKAFGMIGSTVALGEGFGPIVGGWIADYVHWSYLFFLPMMTLVTLPFFLRTLPDEPMKKGGLDVLGGLLFVLGIVSFTLFTTHYEWWYLTNSVILFIGFVLRIRRAKEPFVEPALFKRRRFIVGVFVGGILLGTVAGFMSMIPYMMREVHQMPTSLIGGGVLFPGTLSVILFGIVGGSLVDRQGARFVMVAGLLLLVMGLFIVSLFADRSLWIISGALVLIFGGLSFVKTVISTIVAGSLSADESGSGMGFLNFSCFLAEGIGIAIVGGLLTQLRCNFPILPIVTDVAAYLYSNLTLLLLAVVITGGAIFMIVFKGEKASLDH

SEQ ID NO: 144 - protein, 334 aa, Paenibacillus polymyxa
  REGION 1..334: note = strain LU17007
MASIHEVAKQAGVSVATVSKVINNYSDVSSKTRNKVNKAIELLNYQPNVVARSLVKKRSWTVGMFLLDFFTNPFISELLDGLRKSLEDSGYDLLFLSPNLSNPDYTFTKHCISRNVDGVVMFGVDRTNQNFLDLLQAEMPTMMIDTDLLGPRTGYVTADNRIGAYLGVQHLVELGHKRIAFISGDLGCLVGQTRFSGYQEGLRSNDLPYYDQYVEVEKYSIEGGYKAMKRLLQLPEAPSGVICSSDYMATGAIEAIREIGMRVPDHISVVGFDNTFYAELSMPKLTTINQNITLMGMKAGEHLIRMIENPDYSPPTEIVPANLVVRDSTGEYKE

SEQ ID NO: 145 - protein, 493 aa, Paenibacillus polymyxa
  REGION 1..493: note = strain LU17007
MKMSFNSFTKPLIMILLFSLLTLLFQAALPATPASAAACANPVSYFGEMKASGNKINGSKTNRPMMVKGSSFFWSNWSGPFWNTATVNRMVDEFQVEIVRAAYGVDPSGNPYNTADESKVRDVVNAAIAKGIYVIIDWHSHDAHNNVNAAKSFFSRMAQEYGSYDNVIFEIYNEPTQVSWGTIKSYAEQVIPAIRQHSDNLIVVGTPFWSQNVDQAANDPITSSSNIAYTLHFYAGTHFQSLRDKANYAMSKGIPLFVTEMGFVNADGDGGINYDSTNQWLDWMNQNNLSWANWAINDKTEGASIFNTNGSLTAGGNYLKSILAGHAPYAEWRQNAACGGSSANTLYDFEGSTQGWTGSNISDGPWSVNEWSSKGSNSLKADIIMSANSQHYLLLSQSRNLSGKATLSATVKHASWDSAGDGLNAKIYAKTGSGWAWYAGKAVKINSSGGTTLSFNLASVPNLDDVREIGIQFLASANSSGKSAVYVDNVTLQ

SEQ ID NO: 146 - protein, 287 aa, Paenibacillus polymyxa
  REGION 1..287: note = strain LU17007
MILRAFDLGVSHFDLANNYGPPPGSAEETFGHVLKKDLAPYRDELFISTKAGYYMWPGPYGEWGSRKNLLASLDRSLQRMGLDYVDVFYHHRPDGDTPLEESMGALAHAVKSGKALYVGLSNYGPEETKQAAVILKNLGTPLLLHQPMYSMLNRWIENGLQDVLTEVGAGTVAFCPLGRGQLTGKYIDKLEAEFKTGLRTLKLEAISQERINKFRALEAIAKRRGQTLPQMALTWALREGGVDSVLIGASRVGQIEENVQAVHAELLSAADLQEIDQVMHNIGDVPW

SEQ ID NO: 147 - protein, 255 aa, Paenibacillus polymyxa
  REGION 1..255: note = strain LU17007
MGAGIKEQYKIMFIHAGRGVYQIDGKTFHLQQGEGFIVYDNILCYMEADPTDPWIYSWIAFSGNGVIPLFEQAHISPLHPVFRYSPLFWFDSYLDEFSACDVNHSTSELRRQSILFRSLADWIDMLVATSQLLPEVRPKDAYIRKAVEFIRMNYNQRVSISEVAHIVGIDRVYLSVLFKEILNVSPQQYLLNLRMDKAGDLLDNSQLSITEVSYSVGYSDPLLFSKMFKKVKGLSPSHFRSRLKRDSSMGLSSLD

SEQ ID NO: 148 - protein, 95 aa, Paenibacillus polymyxa
  REGION 1..95: note = strain LU17007
MLDQFLTSYTNRRTDEYGGSIENRIPVIANGQLDNPDKATTIIGQGFADVIALGNGVLANYDWIKKVRNGKPLSELDQNKVLRPDATIKDFEISQ

SEQ ID NO: 149 - protein, 503 aa, Paenibacillus polymyxa
  REGION 1..503: note = strain LU17007
MFQDFKLVGDRPVAIQVKEYIKRLIIKGTFHKDQKLPSTREMSSVLKVSRNTVIAAYEGLEDDGFTYTIPSRGSYVAAMVDCLVANNGGDDASFAWQIDWKTRMSKYAVSAAELDMMKQGIRAPRGIISFTSIAPDEQLFDLGDVRRAFMDRMAIEGQVLLNYGYAKGYKPLIDYLIRYMENKGVDISGKDLLITSGFTEGFDIVLSALRPSARRGTVICENPTHHTAIKNLKLQGFEITGIPMERDGINVEQLEAVLQKQTSSFDLAYLTPSYHNPTGIVMSPAKRSAVMNLMMRYQIPVIEDGFNEELRYSGAHIAPLIATAGRGNGVIYIGSFSKVLFPGLRVGWVLGDRALIDTLESIKRARTIHTSTIDQSILYQYLLNGNFEKYVKRARMEYKRKYELTKACCDTHLSEAQLSGDGGLHVFLTFPAGVNTRQLLEACIDQGVIYTPGDKFFIQEGEGTNTLRLGFSRVTDEQIERGIQIIGQQVRNFHKACGHKNNP

SEQ ID NO: 150 - protein, 313 aa, Paenibacillus polymyxa
  REGION 1..313: note = strain LU17007
MGCHDEDWRYYGGTSTEREVSLQTGQEMLNHLDRSRYEVVPIVIDQPADLIAQVQHTDIDFALLALHGQYGEDGTVQGALETLGIPYTGSGVLASSLCMNKQLSKMLLKSAGVLTPAGLCWQGMGDYDQQAVEQLGYPVIVKPNMGGSSIGIQLVHNEKELHSAIQKACALDQTILVEPFIQGTELTCSIVDGEVLPIIRIRSAHSEWFDYKAKYETGGAEEKVIQLPPVIEQRVRETALASYRLLQCKVYARIDMILCQDVPYVLEVNTLPGMTANSLLPKSAAAAGITFTQLLDRIITSSLHERKREWEKV

SEQ ID NO: 151 - protein, 155 aa, Paenibacillus polymyxa
  REGION 1..155: note = strain LU17007
MNILIREVKAEDGECSTNIDGSFIVDSTLVLQLTGQQIEYTVKERPISKKSYDDDQFEEDTVEDYSNYIDNPDQIIYLALVNNQVVGQIVLKRNWNKYAYVEDIKVDKLYRSFGIGKELIEQAKRWGRMAECQESCWRHKVIMFALVNSMKVAVL

SEQ ID NO: 152 - protein, 203 aa, Paenibacillus polymyxa
  REGION 1..203: note = strain LU17007
MTKKRMEWEEGNWINSPLYARKEGDFLKVAPEKGRDFWKKTLYGFEFEDGSALLSDWNNNTAVEVSFQLASFTELYDQAGILLYHGPEQWIKAGIEINDGIPQLSTVVTAGYSDWSLAAVPEWVGEEVTLRASIIKDAVVIRARTENHGWRTIRVARFPYTTGNQAGPYTCSPTREGFEVTFTRWHFTERDQDLHSDPPVEHH

SEQ ID NO: 153 - protein, 242 aa, Paenibacillus polymyxa
  REGION 1..242: note = strain LU17007
MTSIHHVTPTNHECTGDLSASVPVKAVIFDMDGVLVDSEPIYFEVERSSFAHFGAPMTEEEHHTYVGVTLESMWRQVLDRHQLTNTLEEALAYHRKNVMQTITAYEGLMAIDGLERWLDWLREKGIPIAVASSSPRSLIDLIMEKTGLGRYFDIRITGEEVSQGKPAPDIFLYAAELLGIAPDHCIVIEDSRNGVHAAKSAGMRCIGLHTPGSGQQDLSKADYRISSYDDLWALKESLPFGE

SEQ ID NO: 154 - protein, 349 aa, Paenibacillus polymyxa
  REGION 1..349: note = strain LU17007
MLALVYKSAWDVALEERPIPEIKKDNDVLVRIRATGVCGTDLGIISGKYHAVPSTILGHESAGDVIAVGSAVSSLQPGDRVVIDPTYYCGQCEMCRTGRQNHCTHKAVTETGVSADGTFTDYYVTEDRFLYKLKDHISYEEATLTEPLSCMLTGINQINLLPNFTTVIIGAGPIGILYSYALASKGVTGCLVDISEERLAIADSIAPERWSAHATLEAAIHRLAPAKNQVDMIVDTTGVVGTEVLSQLASGGYLMLVGLRDGISSFNPKEVVDRSLKIIGSIDSLGTFSTAHYLIEQQIIPAKKIITHSYPLDDYHEAFKTLGCNISERTLQPSSQAIKIVLQSNGSGN

SEQ ID NO: 155 - protein, 412 aa, Paenibacillus polymyxa
  REGION 1..412: note = strain LU17007
MHTLTKERFRYGKGITLIDDSGKEYLDGVSGTFNLSLGYNHPHVVAKVQEQVGNLAHMSSSFTEPYVEEVLDHLIQYTPNGIDAGWMRDITGSTANECAVKLAQKYTGATDIISLHLSHHGQTQFATGISGNAFRRKNFPNSTAANSLHVPAPYCYRCPFNSSPDKCGHHCIDAISDAIEYASSGSVACMIIEPILGNGGNIIPPPGYFKRLRQLCDEHGMILIADEVQTGIGRTGYMFASELFDIQPDIITLAKGLGGIGVPVAAVLMQSRLDVLEKHEHSFTSGSNLISVTAAKSTLEVVTEPGFLEAVRSKGSLLGSLLTEMADKHDCIGEARGVGLMWGLEIVDEDDAPDAVKSNGIIDRAFEEQQLILRGSRYGYGNVVKVRPSLTATEDEIVEIVKRLDTVLATLH

SEQ ID NO: 156 - protein, 402 aa, Paenibacillus polymyxa
  REGION 1..402: note = strain LU17007
MKRLFALSCAFYLLIGVTSVVLGALLPTLLPHYGRGYSDGGLLLFLQFFGFLVGVLLTPFMALHMGRKSMLAIALGSIVIACTILGVLPSWNWVIAMAIWIGFGSGIIESSIGAFTIEFTEEQKAVAMSKLDVYFALGALLMPAIVSLYIWFGIWNLTFYTISFLTFILLLFWLTMPVSASTHLTQADIRTTERSVEQARYSGQHRVLLGIFIIFFFVYMGLELGLMNFLPSILTETLQLQGSVASLGVSVLWIAMIIGRMFSGKIAESAGYIPYLLWSAIGTFCFLVFMVFISSQWVTYLLIFGAGIFMSGLFCIALVYANVMIPGMTERTTSILIASGGIGGSVLQYVIGWSMSEWPVAASLWILGGFTLILLLALILTHLWNNRGSRVVDSLAHQSKEG

SEQ ID NO: 157 - protein, 535 aa, Paenibacillus polymyxa
  REGION 1..535: note = strain LU17007
MLQLNRKSLLDRTAWEAAGIELPKYDLELVAHNTRVRPQWVHFGAGNIFRGFVANAQQQLLNSLKADTGIIAAEAFDFEMIDKAYKPYDNLTLLVSMSADGRFCKSVVASIVEGLAAEQNRPDDYLRLIEIFENPTLQMASFTVTEKGYVLTGPDGKYLAVVERDLANGPEQPVHVMSIATSLVYQRYLKGQLPMTFVSMDNCSHNGDLLMDSMITIAKEWNHRGLVEKGFVDYLQNEEKITFPLTMIDKITPRPSLQVQSALRELGLVDMEMIVTTRHTYTAPFVNAEVSEYLVIEDKFTNGRPALEEAGIIFTDRDTVDKVEKMKVTTCLNPLHTALALSGCLLGYQLIADEMKDHTLRRLVETIGYKEGLPVVVDPGIIQPKAFIDEVLQERFANPYIPDAPQRIATDTSQKMSIRFGETIKSYVSTAGLDPANLTAIPLTIAIWCRYLLGLDDQGAPFTLSPDPLLDTLQGYLQNTKLGDQTSEIRYLLEDEKLFGVRLYEIGLGDKIEAMFHEMLASPGAVRSTIEKYVN

SEQ ID NO: 158 - protein, 359 aa, Paenibacillus polymyxa
  REGION 1..359: note = strain LU17007
MNMTWRWYGEGNDNITLDHIRQIPGVMGIVWSLHDKVAGEVWEMERIEKVAEQITSKGFSTAVVESVNVHDDIKIGLPSRDQYIDIYIDTIRKLAKVGVKVICYNFMPIFDWTRTELYKELPDGSNALFYEKAAITDNPRQMVDRILKGAGKFTMPGWEPERLARLDELFAAYAEVTEDKLFDNLKYFLERIIPVCEEVDIKMAIHPDDPAWPIFGLPRIVRRRETIRRILDAVNSPYNGLTFCTGSLGTNLENDLPAMIREFHDRIHFAHIRNVKVFENGDFIEVSHRGKDGSVDVPEVVRAYYENGYQGYVRPDHGRHLWGEEKNCRPGYGLYDRALGVMYLLGVWDSLAQNNKGVN

SEQ ID NO: 159 - protein, 217 aa, Paenibacillus polymyxa
  REGION 1..217: note = strain LU17007
MFTKEEIKQLLKNDILSMILKPGTLLSETTLSERFQLSRTPLRDVLKQLALESYIDIYPKKGNIVSYIDLESVEQMSYLRSAVEKEIMKELSTQFALSDIQKLSEILDRQRAVIDEDHATDQFLILDDQFHQTMFQLVGREFLWQLIQQSNVHYIRYRKLHMLQAGKLMEIWHEHQTMLEYMLNQETSKMDDLVHHHLRKDIHSLEFLRQFADYIKK

SEQ ID NO: 160 - protein, 36 aa, Paenibacillus polymyxa
  REGION 1..36: note = strain LU17007
MLVCVIHFLFMSLVVCRQVVVGIKGFPKEFEILYTR

SEQ ID NO: 161 - protein, 304 aa, Paenibacillus polymyxa
  REGION 1..304: note = strain LU17007
MTSLPLHPALSGKTVVVTGGSGVLCSSMAKELARQGAKVAILNRTADKGELIAKEICESGGESIAVACDVTDVESVKQAEERVRLLLGPCDILINGAGGNHPSANTSLETFHPEDLNQPGITTFFDLSVPGFRNVLDLNFIGTLIPTQIFSKSMIGRPGAVVLNISSMSAPSPMTKVPAYSAAKAAINNFTQWLAVHLAESGIRVNAIAPGFFLTEQNRQLLTNEDGSLTERSAKIIAHTPMRRFGEPEDLLGTLLWLVDETASGFVTGAVIPIDGGFMAYSGYRIFIFQPLPFYFTIANRQGA

SEQ ID NO: 162 - protein, 271 aa, Paenibacillus polymyxa
  REGION 1..271: note = strain LU17007
MIADVSHMHPLFSIEYVVHDADHNMTNFHYHDAYELYFLEKGYHQILIQDSIYDIELHDVALFKPNLFHRSYQNQGCARTCVYFTERFLRLYFTERAIKSLLGCFNTEIIISLNQEVFAKVKRLLKSLEKENVSGESDRIFILLAELLSLLNNNKDSQTVEQQSSKYANFGPILSYINQNYNKITKIEDIAKSFYMSKYYLCHRFKEVTGLTVIQYLNNIKIQHACNLLINTKLTILEIGNECGFNSSMYFCKIFKQTIFMTPSEFRKKAR

SEQ ID NO: 163 - protein, 1215 aa, Paenibacillus polymyxa
  REGION 1..1215: note = strain LU17007
MKSHQGTQNEFELLKRNHTVPVFVSETENSAVHLAFCNLMRDIDWVCGCKLLRAKEMDQSSIVIGTITDNEPLLAYLQEKGVSLKKLALEDGSYRWEAFLQEVIDGVLYIIGTDRRGTIFGIYDLCEAMGVSPWYYWADVPVKTYDVFCLPLDYSKADWPAVQYRGIFLNDEEELDDWAKIHTQDGTIGPAAYQSIFELLLRLKANFIWPAMHVNYFNENPENGALAEKMGIVVGTSHCDMLLRSNQNEWEPWLAAKGYDDASYDYSIEGRNREILQEYWRESVEKNKNYEVCYTVGMRGIHDSGFYTQAIDEDNSMTKEERAEAKCSLLGKVIQDQKQILKDVIGESKENASLQTFIPYKEVLELYDRGLDIPEGVTLIWANDNFGHMRRYPNEKERQRSGGNGLYYHNSYWAAPGTGMSYLFINSIPLAHTENELKKSYESGIRKLWILNVGGLKPLEQDMEFFLRSGWEAGKEEGMTKNASQFVESWINANFSGNHGPEVAELYETFAQVTNVRKIEHMQSNVFSQTVLGDEAGRRLMRLEDIFRRGNAIMYSLPVQERAAFFQMFLMKIHASYYTNHEFYFADRSTLSYERGNMQAADRYVELSIKMADYKRRMLHFYNAKMSEGKWNGILTPESFPPPPTALYPARKPALKIAQGGMRIDLWNEETTLRFSIHGQKQKWFEIGNQGNGTIPFTIEVMEGEDWIILSESEGLIQTEKRILVSIIDPHQHAGKTGQLTVRNHKDMTSVPIKVQVEEGVNVPETFYGHIEADGYVSIPAASYDHNVPGADSTDKSGWVVIPGMGRYEGAAMMAWNGELRPLGGELKNHPYLGYDIFLKEAGQFTLEIHRFLTLNSTGNIRFGIGVDDIAPILVESETRDEWLGTWQESVFNNGEKIRVELPYLASGIHALRIYMVDPYVTINKLVIYTNEQKTCNLGPIASQHYHRLVTDHGLESPTVNWNEIEQLCNQFYETGEHEVPLPVVLYATRDFYATIDEIFLKCFDVPQTMLGDKRYVDICDADGTKDIIKEFGAGMFIESNSIVAIEAEYALENSKNAYLTSSKDGNAIDWSHVQAETNGRTGFAMHVSEPGRQWENPEIAPGMHYKINITNSGNYHIWILVRHHNGQSDSCYLSLDGVVRPLSEQLGQGTLHTYNTAQVYYWCLLSDLELTRGDHLFSILARKSQLRVDRIYMTQGNELPPVDALWTDSIRKQP

SEQ ID NO: 164 - protein, 295 aa, Paenibacillus polymyxa
  REGION 1..295: note = strain LU17007
MFHGLSAFPLTPVNETGIDEKAFVTLIQRLVTAGVDSIGALGSTGNYAYLNREERLRVLQLAVHSAEGIPVMTSISAIRTLEVLRLAEDAQRAGASAVLLAPISYQALTNEEVFSLYEQVTSSLSIPLCVYDNPGTSHFHFSDELHGRISELPNVGSIKIPGVPTDPEAAKTRIKKLRGSIPPHVTIGVSGDSFAVTGLNAGCEAWFSVLGGLFPKACLNMTRLAQDGFADEAERLSALLEPIWTLFHQYGSLRVVSAAAEISGLISSPSLPLPLQPLNPSAREHLKLILNNLQE

SEQ ID NO: 165 - protein, 217 aa, Paenibacillus polymyxa
  REGION 1..217: note = strain LU17007
MKYVFFVIGIFILSLGISFTIQSDLGTSPFDALLVGLSTNVGLTVGSWEIIMALILICCNSLLNRQRPEVLGLLTAFITGIGIDMWLFLLQDVLTPELWYSKVVCFGIGLIVVGLGTATYLQTNFAPIPVDRLTIIVQELTRTNLFFSRTFIYLIFLVIAFILNGPIGIGTLLTVGLGGLILNYFMPLTGKVLDRTLTHSGTSPNHDKDKKHSTNLI

SEQ ID NO: 166 - protein, 150 aa, Paenibacillus polymyxa
  REGION 1..150: note = strain LU17007
MKEVLREIGMIARALDSISNIEFKEYDLTKGQYLYLVRICENPGIIQEKLAEMIKVDRTTASRAIQKLVINGFIEKKEDQHNKKINKLFPTEKGNNVYTFIKREHDYSDNVALAGFSESEVNTIFNLLQRVRKNISDEWEFVKKGNKRNY

SEQ ID NO: 167 - protein, 173 aa, Paenibacillus polymyxa
  REGION 1..173: note = strain LU17007
MNAKIIKCSRADLQTLQEISIETFNDTFKEQNSPENMQAYLERAFNSKQLEKELSNVSSEFFFVYFNEELAGFLKVNINDAQSEKMGDESLEVERIYIKNKFQKHGLGKYLLNKAMEIALGHNKKKVWLGVWEKNENAIAFYKKMGFVQTGAHSFYMGDEEQIDFIMTKSMIL

SEQ ID NO: 168 - protein, 58 aa, Paenibacillus polymyxa
  REGION 1..58: note = strain LU17007
MNKTWLSVVIAVLFEVAWVIGLKHASGWLEWGGTLVAIFVSFILMIWTKACRLNNDGI

SEQ ID NO: 169 - protein, 722 aa, Paenibacillus polymyxa
  REGION 1..722: note = strain LU17007
MRARTLKANTRNVIGSYYKWIAAGMIVTLTGCSFASAAPSPSLSSSSKTSEPTSSLVTFQLQEATIAQMQDAMKSGALSSVELTAMYLNRVYAYDSSGIRLNSIPVLNPDVLKEAAQADQQRAQGINTGPLQGIPYTVKDSYKVKGLTVASGSPAFKNLMAKDDAFTVEKIRKSGGVLIGKTNMPPMAAGGMQRGVYGRAESPYNPDYLAAAWYSGSSNGSGVSTAANLAAFGMGEETVSSGRSPASNNGLIAYTPSRGLISIRGNWPLFPIRDVVVPHTRTIEDMLRLLDVIVVEDKITKGDFWREQKAVRLPSVNSVRPNSYLELRDTQALKGKRIGVPKIYIGKDPETTTPIKFRPSIQALWEKAVKDLTALGAEVVEVDFPLQVNSEKDRPTAKTPEERGLMPAKWAEKEFGLLNPYVAEEFLKSVGDPNFPSWANIDPATVFPNPPGSVDAKRGRDLGHYDVFIDTIKKGVTPYEQIPQFQEGLRGLENVRKIDFENWMKQNNLDFIVFPANSNIGKADSDVNETSYEEAWENGNYFSNTNFLLREYGIPSVSVSMGAMKDTGMPVNLTIAGAAYSDNDLLRYAYSYEQATKNRPIATRTPALEDETFSYNPQTALPPSKRKETEAPALKLNASLKGDILALKGSVTDQSEIAQLKVYVNGMRVAITEDKANWSATLPTTIYKQSGASQADTLHILVLAKDIYGNTSAQIKSVTLPQ

SEQ ID NO: 170 - protein, 184 aa, Paenibacillus polymyxa
  REGION 1..184: note = strain LU17007
MLKRILLVSIIFCLVISTFEFTEKTLPKAAASTGFAHPGLLHTKEDFDRIKQMINEGRQPYLDGWNQLLSSPLSQAGWKSRATSTIIRGGSGQNVAVFYNDIARAYQNALRWKITGDTANGDTARDILNAWSSNLKTISGNADRYLAAGIYGYELANAAELMRDYRGLMWNKCRTCFLPYFTNH

SEQ ID NO: 171 - protein, 388 aa, Paenibacillus polymyxa
  REGION 1..388: note = strain LU17007
MEQMQNMLLTVFYKPLNERFLIGNEYGNSHNDSYIQNYWANWDLSNMAATIAIGIFCDRRDIYDIGVEYFKNGAGNGSIYNAIPFLHPDGLAQWQESGRDQAHTQLGIGLMATIAEMAWNQGDDLYGWADNRFLRAAEYVAKYNNGEDVPFTTYEWGSGRNGAINSQSGISPASRNEMRPIWAMIYNHYVNRKGLSAPNIAARMALEGTEGGPNLKYPSTFDQLGFGTLLYTRPAGSGDKASIPDGNASNGIYRFNVRLDGKVMEADNTIEGANVIKSTYAGKENQQWSVTHLGGGQYSIKNVQSGRSLEVTNGSLDHGAKFQLAASTDQDQQKFAFISTGDGYYRITPVISNKPADVTGLSTAEGVPIQQWRYTSNYNQQWKLESIE

SEQ ID NO: 172 - protein, 230 aa, Paenibacillus polymyxa
  REGION 1..230: note = strain LU17007
MFETELTRTLKIRYPIFQAPMAGGVSTSELVAAVSNAGGLGNLGGGYLTPEQLCSEIQKIKQQTDHPFGVNLFVPEQFEESEEAIYRMTDYLNKYRIELGTAQNPLILKSAESFEEQVQVLLEERVPIFSFTFGIPSPNVIQTMKQHGIFVIGTATTVDEAKQLEAGGVDAIVTQGSEAGGHRGTFLKDASHDALIGTMAIVPQIVDHVSIPVIAAGESWMGGDLQQAFY

SEQ ID NO: 173 - protein, 117 aa, Paenibacillus polymyxa
  REGION 1..117: note = strain LU17007
MGTAFLACPESGAHEKYKQKILSTNEDSTQITRAYSGKAARGIQTKFMIDMHQYSGTIPAYPIQNAMTRDIRQAAAKANNPEYMSLWAGQGLRLANDQPAASIVKQTIDEASILVQS

SEQ ID NO: 174 - protein, 267 aa, Paenibacillus polymyxa
  REGION 1..267: note = strain LU17007
MNNKSKSNAAVRLPRAKGIDMATVYTPKECARKVKRIVLAEKNQTIVDEFITILGMKEKFEEQDVPMPNKIVMFGPPGTGKTLTAFYLAQRLDLPLILVRLDAIIHSHLGETASNVRKIFDYANGTPCVLFLDEFDALGRMRDSNDEVKEMARVVNTLLQCLDEFGGESVFVAATNLEEELDTAIWRRFDTKMTYTLPTHADRIQYIELLIGESLAGQAADLLAGCSFADIEQIVLKAKRKAIIENRALNFENIENALSEYNPRMKV

SEQ ID NO: 175 - protein, 68 aa, Paenibacillus polymyxa
  REGION 1..68: note = strain LU17007
MTVSPLTEEQIQPASIDSEETLIPPLSFMLATTIETIRLPGYITTFVEGRISIGRMSLFMKRSDLTCI

SEQ ID NO: 176 - protein, 89 aa, Paenibacillus polymyxa
  REGION 1..89: note = strain LU17007
MAKKSKVVREKKRQETVAKYAELRRQLKERGDYEALQKLPRNASPTRLKNRCELTGRPRGYLRKFKVSRIVFRELAHKGQIPGVTKSSW

SEQ ID NO: 177 - protein, 336 aa, Paenibacillus polymyxa
  REGION 1..336: note = strain LU17007
METEQDPRIPVTIITGFLGAGKTTLLNHILKADHGYKIAVIVNEFGEVGIDNELIVESGEEIIEMNNGCICCTVRSDLVDIMKSLLHRKFAETLTPVEYDRIVVETTGLADPGPVIQTFLAEPLISNFFKIDAVITVVDAKHAEHHLDNGHEAKEQVAFADVILLNKIDLVEKEDIARLESRLKKMNSHARLTHTHQSLIDLDQILGVNTFDLDHKLEVDPHFLEEHHHHHHDDDIFSIVLTETRPLDLDKVNKFINDWLVEHSADTYRYKGILNVQKTNKRVVFQGVHMILGVDTDREWNVDEDRTSRIVVIGKDLDEDWFRARFSECAVAEASV

SEQ ID NO: 178 - protein, 143 aa, Paenibacillus polymyxa
  REGION 1..143: note = strain LU17007
MSKSVTHSFVLPDKAERLGLFGSVDPIQGDKPVLKEEMQDLQNSKNDFLFELQQVGIENLKYPIDVISVKSPVKVSSIGNFRLTTSLEREFKGINMSRLAEQLQYSRNEGLSDQITDLLRLTQRIAEQMYQQKSQRYVLVLKK

SEQ ID NO: 179 - protein, 135 aa, Paenibacillus polymyxa
  REGION 1..135: note = strain LU17007
MDYKASATELFECIVKSRKPVLEERAHFSRGEMGILIALSHQDGVTSGHLSEYLSVSTGRIATALKSLEKKGLVVRRTDANDKRKVIVFITDSGKQFMMDRYNEGVAWSEKILRKLDEQDAKEFIRLIKLIVSKS

SEQ ID NO: 180 - protein, 589 aa, Paenibacillus polymyxa
  REGION 1..589: note = strain LU17007
MLKIFKYLKKNEWMFVLCSLAFIVVQVWLDLKLPDYMAEITTKLQTAGTPMSELLIPGIYMLLCAVGSMSASIIVGYFAAKVAAGLAMRLRAMVFDKALSFSMEEMNSFSTASLITRSTNDVTQIQTVVALGLQVIIKAPILAVWAIAKIADKNWQWTASTGVAVAVLILMLSVIVIFALPSFQKIQRLTDNLNRVTREHLTGLRVVRAYNADQYQEEKFGQANAELTNTNLFANRLMAMVGPGMTFIMSGLSVSIYWIGTYLINGAAVPDRITLFSNMVVFSSYAVQVVMAFMMVSMIFFLMPRASISAKRIMEVLNTESRIIDGHETAGEEGVMGQVEFRNVSFKYPDAEEPVLRNISFSAKQGETVAFIGATGSGKTSVINLISRFYDVTEGEVLVDGVNVRNYKQQTLHNKIGYVPQRAVLFSGTVASNVSYGDNGRSEASEKLVKAAVGIAQGTEFVEKMDGQYEGRISQGGANVSGGQKQRLSIARAIYRQPEIYIFDDSFSALDYRTDRILRSALKQETGHATTLIVAQRIGTIKDADRIIVLDQGEIVGNDTHEELMANCSTYQEIAYSQLSKEELVHGQE

SEQ ID NO: 181 - protein, 616 aa, Paenibacillus polymyxa
  REGION 1..616: note = strain LU17007
MDKNEHTVDSEHIKMKQQGPMGKGPTEGMGTGKKANDFKKNIRQLLSYIKACAPMIILSMVLALAGSVFNVIGPDKLSDIANLIQEGIVTGIDINAIQKIVLVLVVLYGLGLIFNYFQGFITVTVSQRLTKKMRTELSQKINHMPLKYFDATSYGNVLSRVTNDVDTIGQTLNNSLGTLVSALATFVGALIMMLYTNWIMTITGIVATLIGFSLMTVIMKHSQKYFVAQQAELGQINGHIEETYAGHNVVKVYNGEKAAKEVFHGINGRLYTNAWKSQFMSGLMMPVMMFIGNFGYVAVCIVGALLVNQHVITIGTIVAFMVYIRLFTQPLSQLAQAATNLQSAAAASERVFEFLDEEELKDESDKTMKLDNAKGDVEFKHVRFGYNEDHMIIKDFSMKAEAGQKVAIVGPTGAGKTTLVNLLMRFYELNGGEIYIDGTPISQLTRENVHKLFCMVLQDTWLFEGTIRENIVFSQDHVTDEQVEAACRAVGLHNFLKTLPQGYDTVLDDKANLSAGQKQLITIARAMIEDAPMLILDEATSSVDTRTELLIQQAMDRLTVGKTSFVIAHRLSTIKNADLILVMKDGNIIETGNHEELLGKGGFYADLYNSQFEHAS

SEQ ID NO: 182 - protein, 195 aa, Paenibacillus polymyxa
  REGION 1..195: note = strain LU17007
MCLSFPTKFILIFKPNHHTPFGKISEEFRMNSIVCTSPSKTFNLAGLQLSNIIVPNERLRNELNHKLTTIDIDPGSFATIAQIAAYNDGEEWLVQLLTYLEENLTFIDRFVKERMPKVKLIKPEATYLAWLDFRELGLSDLELQQLMQKKAKVALDDGFIFGAGGELFQRINFACPRSLLQRALESMERSLQGLD

SEQ ID NO: 183 - protein, 160 aa, Paenibacillus polymyxa
  REGION 1..160: note = strain LU17007
MKLHEQDDKYHELDNKASIIYKFVMTYSDYIRAIRDYGTGEEINMVEVHTLTMIEENPGITAAKLSLEWNRTKGATSQILKKLEQRGFILRKKENGNAKNLNLYATEKGEALSRAHKLYDIKELMWADKTLHESFSSEEIKAFYNVMQRYTEMMLSPRSE

SEQ ID NO: 184 - protein, 158 aa, Paenibacillus polymyxa
  REGION 1..158: note = strain LU17007
MQLKKGIELGKQVLLVEKYKPGGECTWAGCIPSKALIQIADEIFTAKKYGNVTHSSNIMSKVRRLTEEAHQGEAVEVLVGEGIDYFNGTAKFENENMINVNDTLISADYIVISTSSSTYVPPIKGLESIHYLTNENVFKLTDLPKSLIVVGAGQLELS

SEQ ID NO: 185 - protein, 176 aa, Paenibacillus polymyxa
  REGION 1..176: note = strain LU17007
MLKEELDLSQHLESILKQEGIEIFTGYSAEEVSEDETGVSLSIVKDSHKEVLHAEKILFALGRKPNVHSLNLDDVGVIYTAKGVQVNEYMQFSAPHIFAVGDLVGSYMFSHMGAIQGKLAVNNAFNKQMKKVSNEYAWCTFTHPELARTGLTEQEAREKYGNNIKVYTRSYKELIA

SEQ ID NO: 186 - protein, 268 aa, Paenibacillus polymyxa
  REGION 1..268: note = strain LU17007
MDNPFFKTGDIAKLHNVSTDTVRLYDKEGLVKPSLVRENKYRYYTLQEVMNFGNVTMFRELDHSISSIKKRLDFSTIDEVVSLNHNQMSHLSKEIKQLEKKMAYLQTLNEHLHSFLEAPNTIQLIENPFLFICRGMEFSWGKNGISLSSSYEDEGVAELFWTRTSLISRNYHKQPDQTVRTTMYCSNIINSDCEAAEKIKIKRALRYNYVGNPFEHTDYMQEIDQQIDSYCQEQQLTISQEKYEVFLICLLDENHSENCYIHILYPLI

SEQ ID NO: 187 - protein, 89 aa, Paenibacillus polymyxa
  REGION 1..89: note = strain LU17007
MSVDDLEKRLRMVGISNIEDVKYGTTENNGEFGYELYPEAKPITKKDMELMLKSYLPKPNRDVSSGVKRISLEGDQTESHRDEVPTQLQ

SEQ ID NO: 188 - protein, 288 aa, Paenibacillus polymyxa
  REGION 1..288: note = strain LU17007
MKQRRIYLFLILANLFWAGNYIFGKMVVSELTPVQMTFFRWTIAICILFPISQIVEKPKWKEVWKKWPILLLMGLLGVIGYNFLLYVALRFTSSLNASLVNAMNPALIVCFAALFLKEPLTLSRMVGLLMSLIGVLLVLTNGQLGMIFRTVYNVGDMLMLAAISVWTAYSLLGRRIKEIPPIAAIAVSALLGLFVLVFFLPTSGNPFPLNGRVVIGILYIGLFPSILSFIFWNAGIREIGASRAGVYMNLITVFTAIMSVAMGNPVHLSQIIGGLIVFAGVYVTTLKV

SEQ ID NO: 189 - protein, 85 aa, Paenibacillus polymyxa
  REGION 1..85: note = strain LU17007
MYQVPSYWVNSNYMRVDFVPIWNTGFPKAVQMIKEAVQGERNDERGHNKMFREMYRALTGQEKFQASVVRNMRKCNPIQKVYSAP

SEQ ID NO: 190 - protein, 66 aa, Paenibacillus polymyxa
  REGION 1..66: note = strain LU17007
MQSYTEGLQRALMGELDAVERYRDIWFGLPAGIYKDTVYGVILDELKHAAKYNYLITLNLKCLVTK

SEQ ID NO: 191 - protein, 220 aa, Paenibacillus polymyxa
  REGION 1..220: note = strain LU17007
MIQIIIVDDHQLVGEGTKKMIELEKDMSATYSSDVNSMLNDLRHKQYDVYLLDMNMPQCSGIELAKSIMKIHKNAKIILYTGFEYLSIFNLLIDTGISGILSKSASQQDLIMSIRSVINGYTLIPVSLLKQLRVTEFVYESAQENNSLHSTSRVTISQKEKELLEYIAKGKNNKQIADDLYMSLRAVEYNLTKIFKKLKVTNRSEALAEAVRHGIVNINI

SEQ ID NO: 192 - protein, 159 aa, Paenibacillus polymyxa
  REGION 1..159: note = strain LU17007
MEKIKVGMLDVIHQIRSTCNDLRPSLLSDIGLIGSVKEWLSQAQLRAEFTIHFEYYDIQEKYYNFEQILSLYRVIQELINNAKKHSQSTNVLLSISEVDSMILLKYSDNGIGFDLESSRSLHQHMGLSGIKERIRSLGGEITIVTSVGKGTVVQISIPR

SEQ ID NO: 193 - protein, 349 aa, Paenibacillus polymyxa
  REGION 1..349: note = strain LU17007
MGISHKSNGFILILAFSFIYFVMCWSFSTLDTSLFEFFLSMEELILITFFFYLLKKGISILPIRENPLFHHWKYAVLLSLIYSSLNTYIFYILFENAEKGFVFFVEIFLELLALHILLIPQEKRVMKLLSVLHPNNNLHERLDKFIQQLPTIMRTEDLNKIIAEEIQQILNPSYLVFLKYTARTENYGLYSNTGCYSEEFVITDNMKNEMKTKTRYELYESDGDIGIFLYNKQETSYVVWVGHTLERAAFCKKQKQWFLTFGKYIHLVYENLNCIHQVIKSFEEQNIEEQIYSVTLRRLIFQLSEKERRRLASDLHDEALQDQILWYRKLETLLGENILEEDLRANWKK

SEQ ID NO: 194 - protein, 345 aa, Paenibacillus polymyxa
  REGION 1..345: note = strain LU17007
MLGYIFPGQGSQKKGMGADLFDQFPDIIRQADVILGYSICDLCTQDRNNLLRQTQYTQPALYIVNALMYMQATQKGEYPHIVAGHSLGEYNALFAAGVFDFATGLKLVQKRGELMSRTSGGAMAAILGLNEEECTEVLNRVPSHTISIANYNSAKQYVISGTQADINRVQPYFDEIENITYIPLNVSGAFHSQYMSEAKQEFGKFIQQFSFSEPSLPVISNLKARPYRLSEIAFNLIEQITHPVKWSETVRVMQGFGDISLVEIGPGHVLTGLANRIQQEFDPIRLSSEEWAWQETKTAAPLQPSSSVKTSSAEKLGSDEFKQAYNLKYAYLSGGCIEGLHPKSW

SEQ ID NO: 195 - protein, 409 aa, Paenibacillus polymyxa
  REGION 1..409: note = strain LU17007
MGKAGMMGFLGTGGLTPEKIEEDIKYIKQALNQEQAFGMNLLHTPDKPEKEEQNVELFMKYGVKNIEAAAYIGVTPALIKFRAMGLSELPDGTVVVNNRIIAKVSRPEVAQNFLSPAPEQLLEKMLKTGAISHQQAKWLREIPVADDLCLEADSAGHTDGGVAYVLMPAISKLREEMMEKYKYRKKPSIGAAGGIGTPEAAAAAFLMGADFIVTGSINQCTVEACTSDAVKDLLQQINIQDTAYAPAGDMFELGARVQVLKKGVFFPARANKLYELYVQHCSIDEIDEKTKKQLQERYFKKSFEDVYAEVKQYYDQAEIEKAELNPKRKMAQIFKWYFAYSSRAAIEGIAGCQVDYQIHCGPALGAFNQWVKGTELEEWRYRHVDEIALKLLAGTVKLLQLNARKEWGS

SEQ ID NO: 196 - protein, 992 aa, Paenibacillus polymyxa
  REGION 1..992: note = strain LU17007
MKSRRREIAVIGIACRFPGANDYSCFWDNLEKGVNSIREITPDRWDPDIYYSPDADSPGKSVSKWCGQVENIYDFDSGFFNISPREALTMDPQQRILLEETWHCIEDSGIPLSVLQEKITAVYVGAMTTDYRQEFTSVNLNTDSYDCLGNFESILANRISYTFDLKGTSQTLNAACASSLVAVQEARRALIEGECDYALVAGVNLNLHPWKYVSFSKSRMLSPDGQCKTFDIAADGYVPGDGIGVVLLQRVDESTMDKNHIYGVIKGAAVNHVGKSLSMTAPRMEAQRNVILSALEDAEVQAETISYIEAHGTGTSLGDPIEIQALTQAFQKHTENKRFCHIGSVKTNIGHLEGAAGLAGVIKVLLMLQHRKIPATLNIKTINPILQLEQTPFCIADQPLAWQDNGTNPLRAGVSSFGFGGVNAHIVIEEYVNRDPETDDFQSASVALEFFALSAKSSSSLSDALHSWTSGLLHNKWGSYTLTDISKTLLTGRSSFPYRYGCLVESKEALLRQLASRSELLTKVPHSSWVLHIGQRSCSGFGEFSDFYAECYLFRKQIDQLIKILKKLRYQRNVCNDFYESVWPEKYVDLYNFIAHFAYVSVYLELGCSLHQVTCDISGIWVAIAVSAMAQIEKILAVKSGRMSLAMLQLKRPRIPFKDPVSGNELLPIVIDAEYLRELITSILEQIPIEKADHTRQCYVAISNNFVDYLEKTKLLYHSQFTLKKYIDEWQEQIIRITGYDIYKHINQEETTVNITQSTNREQLLLGLAIVCSWRKLNRKWNLQDQTELLDSRFQELTDLIIDDFIPAEVILELLTDQKAPWEKVADILVDAQSKLSYEHHPYVLLKKHNEQLREIINVSEWLTAASDMEPSTVDENSICLCIKDDLANATDTNKTFKENLLRLWLQGADIDWSRLYEKPVHKVQLPGYFFDRSTCRISQNQKGDKHLFSCQSDSKQDKNLLVQDLELQHLLKLLEQGNLGVDELKQIMGAE

SEQ ID NO: 197 - protein, 717 aa, Paenibacillus polymyxa
  REGION 1..717: note = strain LU17007
MDDNQMSVDNILHMIKDGLMSAEEGFSCIKRIQYQQEVIHHSSLTQPALLYQPVWDEQIAVPRLSESRQIIMFDTDDCHWNVLKQNGVRVTLVKPGTSFKCLAEDVYEISPMVENDYNKIWGALLDKGQEITDIIHWWSKIGQDSNEFENNNHLYHLFFLTKALMKIERQEPIRLLYVFKEQKNKLNFLEAMGGFARTVRRENPDFIYKTFQYTEPAEHIVDQLLEELRSADKDVEIRCYKGKRQVKQMVLMQKRQQQPSAIPFKKHGTFLISGGLGGLGYIFAVHFAAKFQANLAIVGRSELTSSKREMIHRLESLGAKVLYIRTDIATREGAHEAVKLAKQQFGAVNTVIHAAGVLRDSYIPYKTVQQIREVLEPKVNGTFWLDEATSDETLDYFIMFSSIMAFKGNPGQSDYAFANAYMNSFAVQRESLRKQRARTGKTISVNWTLWEDGGMKVDDATLVFLENTMGIVPLSTLEGIQAFKYVIAAGAPQVAVLKELSDVKIVSKSSADNQPQKQGTTTTSEDKELYDFICLEIKKLISEILYVDVLKIDLDTDKNEYGFDSISVTDLINRLNKKFGLELTPPLFYEYSDFSAFCSMLRKKYSRQIAFVYGQLDSDKKLPPLVQDSILSPSPVNSIPNSQNRTFINESYEAEPIAIVGMSGVMPQTADLDELWQQIYHEADLITEVPKDRWDWREYYGDPLKETNKTNIKWGDL

SEQ ID NO: 198 - protein, 652 aa, Paenibacillus polymyxa
  REGION 1..652: note = strain LU17007
MNEVDKFDALFFGISPHEAELMDPRQRIFLETVWKVIENAGYKTSDLSGSQTGLFVGVGNSDYNDVLIDNKTEIQAHTPSGLFNSILTNRISYILNLHGPSEPIDTACSSSLVAVHRAVESIRSGECEMAIAGGINVILSPKLFIALNKAGMLSESGRCHTFDRRADGYVRGEGSAAVMLKPLCRAIKDGDTIHAVIKGSSVNHGGHATSLTAPNPNAQARLIIEAWRKANIDPATAGYIEVHGSGTPLGDPIEINGLKKAFDELYSYWGRDIPVEPHCGIGTIKTNIGHLESAAGIAGLVKVVLCMKRQKLVKNLHYEEHNSYIELNNSPFYIVNQTGNWNRTGKDIPLRAGVSSFGFGGVNAHVVIEEWMNQKKTAEITKQANVIVISAKNEDRLHAYVKNILNYLENSDPEISDLFYTLQEGRDEMDERLAVVTDDKQDLIAKLQLYLQQKSATESIYRGNAKSGSIVLGSLMDGEEGKAFIEHLIKTHKLNKLAKLWVSGMKINWKLLYQCLPNRIPLPVYPFKGERYWISPSTKIDTETSSHYAYENHPLIQRNTSDLSEFRFSSILSGHESYLVHSNEGEFPVFTGGIFLEMACVAVQAITGLQERKLIGQELHIALEDIHWISSVQTNTGPLISISGFARKKISI

SEQ ID NO: 199 - protein, 170 aa, Paenibacillus polymyxa
  REGION 1..170: note = strain LU17007
MVYSQGKGFIGSYLEQNFDIGILRSQFPQLVELTEQFYKEFYSLQGSTFARQELWRIDSLYTGLSGALARFLPTSAESDNFQQFVLHPCLVDLALQTLVWFYEPNQAESGNSQEMEKTFAMHKLTVLQTCPKALWIHIQYTPGRETKTFDINMLDEQGRLCVRMEGLTYN

SEQ ID NO: 200 - protein, 94 aa, Paenibacillus polymyxa
  REGION 1..94: note = strain LU17007
MTKMLMFEPIWCDQLSTSNKIEFERIIVLLCDPEKEFKEDLCEYLKEKLSSAFKNHSFKNTVDAVDCSRIDTTENRRDRIFRDYALQSFQVLKM

SEQ ID NO: 201 - protein, 2110 aa, Paenibacillus polymyxa
  REGION 1..2110: note = strain LU17007
MESKPRGHILFQIVSVLPRHAEQQLRAGLTGLLRTAKLENPKIVGQFIEINSACSAEKLLSILKENSQYPQEHHVRYVDNIRETASWKECNVQDQNHTIVELNNPVPWKDGGVYLITGGTGGIGQILSHEIADTVKHPTILLVGRSPANSAKGFLSELQAKGARVIYESVDITDSSSIQKWMNLVVEEHAQLNGVIHCAGVHKDNFIIKKDSSEVDEIMSPKVAGTVNLDEITKDMKLDFFLMFSSAAGAVGSVGQADYALANSFMDRYAAYRNELANRQERYGWTQSINWALWERGGMKVDDVTKHTMKETMGVIPMLSTSAIKALYAVMKSEKQQVLCAEGEEQKLRNYILCNHAASNLKNKEQASSNIDKQRLRMQVQTKLKELMSKELKLEASQIDVFEPLETYGIDSLIIMSANRKLAEVFDDCSKTLFYEYRTLHELSEYFTENMTDSCSEWTGFLITTQDEGESQDHTQVETRKLREKPLKKTKKTNSFFYTSSPFSRNKSKDPIAIIGISGHYPEADNLDEYWNNLKNGKDCISEIPTDRWTLDDFYEPDPNKALVEGKSYSKWGGFLQGFSNFDSLFFNISPREALNMDPQERIFIQTCWEALEDSGYTRALIKQRHFGKVGVYAGITKTGFSLYGPTFWSQGDKLFPHTSFSSVANRISYLLNLNGPSMPVDTMCSSSLTAIHQACQHLHNGDCEMAIAGGVNLYMHPSNYIELCNAKMLSVDGKCKSFGQGANGFVPGEGAGAVILKPLSRALADEDHIYALISASHINHGGKTNGYTVPNPVAQGELIREAMQKAGVNARAISYIEAHGTGTELGDPIEITGLQQAFDKDTQDTDFCAIGSVKTNIGHLEAAAGIAGLTKIVLQLKHSQLVPSLYADKLNQNINFSKTPFFVQKQLSEWKRPLLNTGKEFPRIAGISSFGAGGSNAHVIIEEYIPKAESKSVWTVSSEQPAIVVLSARNTERLQEQAGQLLQAIEETQIPDERLGDLAYTLQIGREPMEARLGFLASSMHDLRDKLTAYLSGEAGKAELYTGQVKRGGEGVRTLTLDEDMHEAVGKWMEKRKYAKLLDWWARGLNVEWNQLYGNIRPRRMSLPTYPFARERYWVPQPAEPRVLPTGVNPAGAPARAVLHPLLQENTSDLAGQRYSSTFWGTEPFLRDHVVQGAAVLPGVAYLEMARAAVESARGTQEQPGVLQLSRIVWSRPLQVEGDAVQVDIGLAVEEDGRICYDIYQETGVSGEPVVHSQGQARWLEASEIARVDLAARQAACTQGVMEGAACYAQFAKLGLQYGPTHQGLVRLHLGEGEVLAHVRLPEEARATQALYTLHPALMDAVLQGCLGLQLAAGQGAPKPELPFALEALEVRQACPEEGWAWIRYSAGSGPEARVRKLDIEVCDPQGQVCVRLSGFSTRPLHGEKTQLGTVMAEPVWHAQEVPATHAQQEPEEAHLVLLCAPPKSASPVAWAALLDLLQTSPQVVCHRLQAEAQRLEQRYEQYAMQALERIQEVLRSKPQQRVLIQIVSVDSEVEEAGYAALWSGLTGLLRTAQLEQPKLRGQMIELGRLSTGQEGLQRLQDNRRCTQETDIRYRAGAREVARWQVCPEPTSPETLPTLPWKDGGVYVVTGGAGGLGQRVAQDIAAKTKHPILILAGRSPESAAAEPLAQLRAQGAEAIYAQLDVTDGPAVHALMKQIQQKYGALNGVIHSAGVIEDQYLLKKNVAEGKRVLAPKVAGTVHLDEATRGMKLDLFLLFSSIAGVLGNAGQADYAMANAFMDRYAVYRQERVKQGIGHGRTLSLNWPLWAEGGMQVDLATRQRMEQQLGLTPLRTTTGITLLYQALAGTSARIMAAEGRIARLRTVLLNENAPERATVQVEPKVEGVDSIALQDEVEHALTRQISNMLKVKLDEIDHEGELHEYGFDSITLTELANVLNQTYTLDLTPTIFFEYATIRDLAGYLVREHRGALSRSFGGMRQTAASVPARPSFVEPQAYESESGQPPVRLAGRGHRTGFAPAASTPTAREAIAIIGMSGKFPGANNVDELWQGLVSGIDGIREIPAERWDWRAYYGDPQEETNKTNIKWGGFMEGMDEFDPCSSVFRPEKRS

SEQ ID NO: 202 - protein, 2194 aa, Paenibacillus polymyxa
  REGION 1..2194: note = strain LU17007
MDPQQRLLMTYVWKAIEDAGYAAQSLSGSSTGIFVGTGSTGYHELIAQSQVAIEGYSSTGKVPSVGPNRMSYFLNLHGPSEPIETACSSSLIAVHRAVRAMQAGDCAMAVVGGVNTLVSPADYISFNKAGMLSEDGRCKTFSAEANGYVRGEGVGMIVLKRLFEAERDGDHIYGVIRGTEENHGGRANSLTAPNPKAQTELLKSAYRKAGIHPATVSYVETHGTGTPLGDPIEISGLKHAFEELSEEMADPGLGSGTPQVRCGLGSVKTNIGHLELAAGIAGVIKILLQMKHQTLSKTLHFERLNPYIDLQDSPFYIVEETMPWEALTDAQGQEIPRRAGVSSFGFGGSNAHVIIEEYIPKTESKPVWTVSSEQPAIVVLSARNTERLQEQAGQLLQAIEETQIPDERLGDLAYTLQIGREPMEARLGFLASSMHDLRDKLTAYLSGEAGKAELYTGQVKRGGEGVRTLTLDEDMHEAVGKWMEKRKYAKLLDWWVRGLNVEWNQLYGNMRPRRMSLPTYPFARERYWVPQTSETRVLSVGVAPARAVLHPLLQENTSDLAGQRYSSTFWGTESFLRDHVVQGAAVLPGVAYLEMARAAVESARGTQEQPGVLQLSRIVWSRPLQVEGDAVQVDIGLAVEEDGRICYDIYQETGVSVGPVVHSQGQARWLEASEIARVDLAARQAACTQGVMEGAACYAQFAKLGLQYGPTHQGLVRLHLGEGEVLAHVRLPEEARATQALYTLHPALMDAVLQGCLGLQLAAGQGAPEPELPFALEALEVRQACPEEGWAWIRYSAGSGPEARVRKLDIEVCDPQGQVCVRLSGFSTRPLHGEKTQLGTVMAEPVWHAQEVPAAHAQQEAEEAHLVLLCDPPESALLSGEETAWAALLDLLQTSPQVVCHRLQAEAQRLEQRYEQYAMQALERIQEVLRSKPQQRVLIQIVSVDSEAEEAGYAALWSGLAGLLRTAQLEQPKLRGQMIELGRLFTGQEGLQRLQDNRRCSQETDIRYRAGAREVARWQVCPEPTSPETLPTLPWKDGGVYVVTGGAGGLGQRVAQDIAAKTKHPILILAGRSPESAAAEPLAQLRAQGAEAIYAQLDVTDGLAVHALMEQIQQKYGALNGVIHSAGVIEDQYLLKKNVAEGKRVLAPKVAGTVHLDEATRGMKLDLFLLFSSIAGVLGNAGQADYAMANAFMDRYAVYRQERVKQGIGHGRTLSLNWPLWAEGGMQVDLATRQRMEQQLGLTPLRTTTGITLLYQALAGTSARIMAAEGRVARLHIALLNERATVQVEPKVEGVDSIALQDEVEHALTRQISNMLKVKLDEIDHEGELHEYGFDSITLTELANVLNQTYTLDLTPTIFFEYATIRDLAGYLVREHRGALSRSFGGMRQTAASVPARPSFVEPQAYESESGQPPVRLAGRGHRTGFAPAASTPTAREAIAIIGMSGKFPGANNVDELWQGLVSGIDGIREIPAERWDWRAYYGDPQEETNKTNIKWGGFMQGMDEFDPLFFGISPREAELMDPQQRLLMTYVWKAIEDAGYAAQSLSGSSTGIFVGTGSTGYHELIAQSQVAIEGYSSTGKVPSVGPNRMSYFLNLHGPSEPIETACSSSLIAVHRAVRAMQAGDCAMAVVGGVNTLVSPADYISFNKAGMLSEDGRCKTFSAEANGYVRGEGVGMIVLKRLFEAERDGDHIYGVIRGTEENHGGRANSLTAPNPKAQTELLKSAYRKAGIHPATVSYVETHGTGTPLGDPIEISGLKHAFEELSEEMADPGLGSGTPQVRCGLGSVKTNIGHLELAAGIAGVIKILLQMKHQTLSKTLHFERLNPYIDLQDSPFYIVEETMPWEALTDAQGQEIPRRAGVSSFGFGGSNAHVIIEEYIPKPESKPVWTVSSEQPAIVVLSARNTERLQEQAGQLLQAIEETQIPDERLGDLAYTLQIGREPMEARLGFLASSMHDLRDKLTAYLSGEAGKAELYTGQVKRGGEGVRTLTLDEDMHEAVGKWMEKRKYTKLLDWWARGLNVEWNQLYGNIRPRRMSLPTYPFARERYWVPQTSETRVLSVGVAPARAVLHPLLQENTSDLAGQRYSSTFWGTEPFLRDHVVQGAAVLPGVAYLEMARAAVESARGAQEQPGVLQLSRIVWSRPLQVEGDAVQVDIGLAVEEDGRICYDIYQETGVSGKRWCTVKDKPAGWKQAR

SEQ ID NO: 203 - protein, 784 aa, Paenibacillus polymyxa
  REGION 1..784: note = strain LU17007
MVYSQGQARWLEASEIARVDLAARQAACTQGVMEGAACYAQFAKLGLQYGSTHQGLVRLHLGEGEVLAHVRLPEEARATQALYTLHPALMDAVLQGCLGLQLAAGEGAPEPELPFALEALEVRQACPEEGWAWIRYSAGSGPEARVRKLDIEVCDPQGQVCVRLSGFSTRPLHGEKAQLGTVMAEPVWHAQEVPAAHAQQEPEEAHLVLLCDPPESASLPGEETAWAALLDLLQTSPQVVCHRLQAEAQRLEQRYEQYAMQALERIQEVLRSKPQQRVLIQIVSVDSEAEEAGYAALWSGLTGLLRTAQLEQPKLRGQMIELGRLSTGQEGLQRLQDNRRCTQETDIRYRAGAREVARWQVCPEPTSPETLPTLPWKDGGVYVVTGGAGGLGQRVAQDIAAKTKHPILILAGRSPESAAAEPLAQLRAQGAEAIYAQLDVTDGLAVHALMKQIQQKYGALNGVIHSAGVIEDQYLLKKSVAEGKRVLAPKVAGTVHLDEATRGMKLDLFLLFSSIAGVLGNAGQADYAMANAFMDRYAVYRQERVKQGIGHGRTLSLNWPLWAEGGMQVDMATRQRMEQQLGLTPLRTTTGITLLYQALAGTSARIMAAEGRVARLHIALLNERATMQVEPKVEGVDSIALQDEVEHALTRQISNMLKVKLDEIDHEGELHEYGFDSITLTELANVLNQTYTLNLTPTIFFEYATIRDLAGYLVREHRGALSRSFGGMRQTAASVPARPSFVEPQAYESESGQPPVRLAGRGTGQGLPLPLQPLQPEKRLPLSG

SEQ ID NO: 204 - protein, 1397 aa, Paenibacillus polymyxa
  REGION 1..1397: note = strain LU17007
MSGKFPGANNVDELWQGLVSGIDGIREIPAERWDWRAYYGDPQEETNKTNIKWGGFMQGMDEFDPLFFGISPREAELMDPQQRLLMTYVWKAIEDAGYAAQSLSGSSTGIFVGTGSTGYHELIAQSQVAIEGYSSTGKVPSVGPNRMSYFLNLHGPSEPIETACSSSLIAVHRAVRAMQAGDCAMAVVGGVNTLVSPADYISFNKAGMLSEDGRCKTFSAEANGYVRGEGVGMIVLKRLFEAERDGDHIYGVIRGTEENHGGRANSLTAPNPKAQTELLKSAYRKAGIHPATVSYVETHGTGTPLGDPIEISGLKHAFEELSEEMADPGLGSGTPQVRCGLGSVKTNIGHLELAAGIAGVIKILLQMKHQTLSKTLHFKRLNPYIDLQDSPFYIVEETMPWEALTDAQGQEIPRRAGVSSFGFGGSNAHVIIEEYIPKTESKPVWTVSSEQPAIVVLSARNTERLQEQAGQLLQAIEETQIPDERLGDLAYTLQIGREPMEARLGFLASSMHDLRDKLTAYLSGEAGKAELYTGQVKRGGEGVRTLTLDEDMHEAVGKWMEKRKYAKLLDWWVRGLNVEWNQLYGNMRPRRMSLPTYPFARERYWVPQTSETRVLSVGVAPARAVLHPLLQENTSDLAGQRYSSTFWGTESFLRDHVVQGAAVLPGVAYLEMARAAVESARGTQEQPGVLQLSRIVWSRPLQVEGDAVQVDIGLAVEEDGRICYDIYQETGVSGEPVVHSQGQARWLEASEIARVDLAARQAACTQGVMEGAACYAQFAKLGLQYGPTHQGLVRLHLGEGEVLAHVRLPEEARATQALYTLHPALMDAVLQGCLGLQLAAGQGAPEPELPFALEALEVRQACPEEGWAWIRYSAGSGPEARVRKLDIEVCDPQGQVCVRLSGFSTRPLHKERTVEHANSESLNTLKQPDMASSAVTAEPIMLTPVWETFQPEFYQDSLPPSGRLVIIGEDATRLQSFLNHYPDAYKLQLHSGHTIEDISQELEALGSIDHLVWIGPAYNPAQLVDASIISDQEKGVMLVFRIIKSLLQAGYGSRPLHWTLITQQAQPVHMYDAVNPAHASLHGLMGSVAKEYARWNIKVLDMETKEEWPLEEMMVTSSQPYEGVWICREGDWFRRELIPVSMSVPENTKLRLGGVYVVIGGAGGIGTVWSEYMIRTYQAQIIWIGRRPQNEEIVHQIQRLSKLGPAPTYITVDAADEVGLAQACRQIKERYGNIHGVVHSAIVLCDKSISYMEEERFRTGLQAKVDVSVQLAQVFGGEELDFMLFFSSMNSFLQAAGQSNYVAGCVFEDAFAHQLSLERGCTAKVVNWGYWGSIGVVASEEYQKIMSTQGWGSIEPQEAMKVIEALLAGNLNQIAFLKAHQKLAIEGVAWEKSLVLL

SEQ ID NO: 205 - protein, 2296 aa, Paenibacillus polymyxa
  REGION 1..2296: note = strain LU17007
MNFHQSNIKELGEMQGFLIGWLQTLLNSYNLRENEDVLPQYKNWLEAGKLFVQEFREQNPEVSIETMTSSKLQVGWEEGKKRWSTKENMKAQIDLLEVTLKNIPAILTGKIQATDVMFPGSSLHLVENVYKNNPTADYFNTKVATEVIEYIQKKSNQPLTAGIRILEIGAGTGGTSFSVLKSIQTSGFDIAEYCYTDLSKAFLMHAENEFGPHYPFLTYRLLNIETPLQDQSIDLASYDVVIASNVLHATKSIRQTLRNAKTLLCKNGILILNEISDKSLFTHLTFGLLPGWWLYEDTKQRIPGCPGLYPKSWKRILEIEGYGSVSFPAQHDHGAGQQIITAISDGRIHMLSGATLHQNSSFVNKSLPHKFSLRNKASVYEEGNPIAIKVRELIVSKLSESLKVNKEVINYDESFSDYGVDSITGVQLVQEINRSLVLTLETTVLFDFSSVNQLTNYILEYHIPLFHTDEDKDTVIAADEQHVQKVIIEKLSESLKVSQSAIDINESFSDYGVDSITGVQLIQSINKALTIQLETTDLFDYSSVYQLASYIAAHHSPLVPQLNMSSQEQTTKKHKLVKENTLERSHSNVNSYSTNRIFHNSSSSGFTVKSDPLVQENGQSTNGKKVAIIGMSGRFAHSDQLEDFWDNLINERDLVQKVSRWDLSKYHHEDTNYCNCGSFIDDMDTFDPLFFNISGLEATYMDPQQRVFLEESWKALENSGYAGEEISGKKCGIYAGGVSMDYQRLIGDTPPAQAFWGNSGAHIPARIAYYLNLQGPAIAVDTACSSSLVAIHLACQSLWAGEIEMALAGGVFLQSTPGFYVATQRAGMLSTSGRCHAFDRRADGFVPGEGAGVIVLKLLDDALKDRDHIYGVICATGINQDGTTNGITAPSSKSQERLLQEVYENFNINPATIQMLEAHGTGTKLGDPIEYRALTRAFRTFTDKTKFCALGTVKTNIGHTQYAAGIAGLLKILLSLKHHQIPATLHFESPNESINLENSPFFVNSRTSNWAVEPGMVRRAAISSFGFSGTNAHMVIEELDVKEEQPRASKEFLFVWSATSRDQLEKLAERFILFCQQQPLTDCGNMSYTLMTGRKHMNYRLACVAASTEELISLLSAWLAHRAADKVFYSVTNGMEQQQETGRLDSKQNGNDLIRFSRETSGRERTSQLMTLGAMYTRGCELNYKELFSAEPYKKCPLPCYPFSKKRYWAEQVSEIQNNRVSVSSVPSIKPTIGQTKRSACIAVKGWDPVEISASLASIGNVIILTTPDSEYLAECLARHFNSAKIVHDYELKLEHHWSTYQGFIDLTGCGIHSTFSSEWISWLQKLISSKAKPDIMLLFVTKGLESYQNNRIRMAGASRVGLYRMLQSEYSHVRSRHMDAEFVTDDESLAHQIACEFQSNSEEPEICYRNGVRYRAVLHIKNEEEAVDVSRLSFPAEQVLWITGGTRGLGLLCARHFVKQYGVKQLVLCGQEALPPRDEWDRYDGQSSIVAQKIQNFRELENLGVRVQVLTLDLADEKEVCSSIQKVKRTMGSVGGVIHCAGSVDMENPAFIRKRSEHIERILHPKVDGLAMLHRHLENEPLQFFMLFSSVAGIVSSLGVGQSDYAMANAYMDYYAESVSSHCPAVSIQWPSWAETGLGQIKSKALEQMGFLGMTDQEGLRLLDLVLQIVNRPSGKGAVLLPAIVNPEVWEPSTLIQRRMRTVSADDLKVAPVFLPTVSKGQQVDNVVLDTQNWLRHILSEELQLEKAELDNRRSFQEYGMDSILLVQLVKAMDKELEGISMDPTLILEYPTIEALTEYLVDRYREELQRKFGTKPVDSQETVSEDNQMLNTIAVIGISCQFPDADDVEEFWGNLRNGKDSIGEVPSNRWNTEKYYDPEYSHNGKSICKKGAFLKDIENFDADYFQIPEDMAVHIDPLQRKVLECGAQAFADAGYSKEKLWGRNVGVFMGARTSNYYKKLGHCEKDTIIGTGQNFIAAHLAHIYNFKGPNMVVDTACSSALTAVHLAMQSLQLGESEVALAGGVDILLDQTPFVIMSTSQILSADGYCKSFSANADGIGLGEGCGVVVLKPLHKAIEDQDKIYAVIDGSAINNDGNTMGVTTPNPQTQRELIHKAITVAGVHPETITYIEAHGTGTLIGDPIELKALTEVFADYTDQKQFCGVGSVKSNIGHTLSAAGAASLIKVILSMIHEELPPTLHCLNPNPRFELQNSPFFIVQNLRDWKSETGVLRAGISAFGLGGNNAHLIVSNEDIPKALRASLESRLAKISFNKKKYWPESDHVEKQFTGFFDAIQL

SEQ ID NO: 206 - protein, 2699 aa, Paenibacillus polymyxa
  REGION 1..2699: note = strain LU17007
MIEPSEKTYVQRLEHTNPIVQDHRVHGVCTLPGVVLLDMIYRLSIQQLGLEIIELKQIVFMQPVVTTEQFDQNIYVTFTPVGSDWRVSVSSRRIRGEQFIDDQTSINMQCLLQSIDYLKERYDPGIDIKQLMSSATAKWDMDEVYSLARGVKINHYPFMKTNGTVFQKENQELMRLQLSPLAVKYIDKFHAHVAFLDGSTFAGSSFRLKGLQTGVFEDDTPYIPFMISHFRIYRPLPHTIYTYTTQQNEAIKEVSGVVPDILTRDITIMDEMGQVLVEFKGFSIKRIREPRLIKDLIELEELSPAVSNHLDVNINETLSLEKSQGMENRAAPALRPHKSYDAKKTILYYLQTEIAAMLNTSANQVGIYDGFYQLGLNSIQLLELVKILEQKIRRPLYPTLLFEYSTLETLSEYLMENSGDAFSYQESSEEPVDQTPKVKAGYPTAQRLLFEEIWNRQCRSSSSNSSAERRHCIIFYDRMHNLQVYLQQHTEFEQVLDLNAATPYEGEAWEDKFKRLLLIIQNELLRKSQTKLLIQLVSGNQETNKYAAALQALLKTAYIENPKIQSQHIIIDDLASCLPETIVPLLQLEAQAHDQGTIAIAYQGKQLERYVQEFIELKVPDAPYNYCKDAAYVITGGLGGIGILLAHHLTDVCEGRVKLALLGRSPLTLENEMRINALIEKGAEVIYLQTDLTSLNETEHAFKVIKQKWGAPAGIFHCAGVIHDQLIIQKTPSEVDRVLKPKLQGSHHLDIATQGEALDFFMLFSSVSAITGNLGQADYASANAYIDIFAKERQRKVKQGQRKGITLSVNWPLWSEGGMQIGDQMEEMMYASSGTLPLPTTEALRIVDSLLMAEQARAIVLYGDYEKILKNMGGLAYNSPAGELASTTGDNVISANERSSDTDDIAIIGVSGRYPMANNLDELYQNLKEGKDCISAIPESRWANNSISYDVNEFYKYGGFIEGIDEFDPLFFNITPFHAEMMDPQARLFLQTAWEACEDAGFALQRTHHDYSSSSHRSVGVFAGVMWNHYELYGSEMTQRGTPMGFGISSSSIPNMVSYSMNFHGPSIAVDTMCSSSLTAIHLACESIRRDECQYALAGGVNLVTHPHKYVFLQQAHFLSSDGKCRSFGVDGDGYVPGEGVGALLLTKLSVAEKEGYPIYGVIKGSAINHVGKTSGSTVPDPIAQSEVISDAIRKAGVDPKTITYVEAHGTGTSLGDPIEVHGLQRAFQPWTDGEKFCALGSLKSNIGHLEAAAGIAGITKLLLQFKHKEIFPSLHAEKLNPYISLDNTPFYVETGFQSWARPTIEVAGQKTTVPLRAGISSFGANGSNAHLIVEEYEKKIVFENERQKEIKSVLIPLSGKNEDRLQVYAKKILEFLQNQLVALDDRNIKEADAAKELLMNMAFTLQTGREAMEHRVIFEVSTIAELMHQLDMFLNKLTDIPNCYQGKVVGQHFDRQILDEDRKIDAKWIQERKFREVSKRWVKGALIDWSLLYGNMRPRRMSLPTYPFARERYWVPQPAEPRVLPTGVNPAGALARAVLHPLLQENTSDLAGQRYSSTFWGTEPFLRDHVVQGAAVLPGVAYLEMARAAVESARGTQEQPGVLQLSRIVWSRPLQVEGDAVQVDIGLAVEEDGRICYDIYQETGVSGETVVYSQGQARWLEASEIARVDLAARQAACTQGVMEGAACYAQFAKLGLQYGPTHQGLVRLHLGEGEVLAHVRLPEEARASQALYTLHPALMDAVLQGCLGLQLAAGQGAPKPELPFALEALEVRQACPEEGWAWIRYSAGSGPEARVRKLDIEVCDPQGQVCVRLSGFSTRPLHGEKAQLGTVMAEPVWHAQEVPAAHAQQEPEEAHLVLLCDPPESASLPGEETAWAALLDLLQTSPQVVCHRLQAEAQRLEQRYEQYAMQALERIQEVLRSKPQQRVLIQIVSVDSEAEEAGYAALWSGLTGLLRTAQLEQPKLRGQMIELGRLSTGQEGLQRLQDNRRCTQETDIRYRAGAREVARWQVCPELTSPETLPTLPWKDGGVYVVTGGAGGLGQRVAQDIAAKTKHPILILAGRSPESAAAEPLAQLRAQGAEAIYAQLDVTDGPAVHALMKQIQQKYGALNGVIHSAGVIEDQYLLKKNVAEGKRVLAPKVAGTVHLDEATRGMKLDLFLLFSSIAGVLGNAGQADYAMANAFMDRYAVYRQERVKQGIGHGRTLSLNWPLWAEGGMQVDLATRQRMEQQLGMTPLRTTTGIALLYQALAGTSARIMAAEGQVHRLKELILGHGHVVSDNLNTIELDLTQMVAKVLKVEPDYVDIDVDLIDYGFDQVLFAELMGTMNKHFQLDLSTNIFQEYTTILRLSAYLKSIFIDPTQNQHTINPASDPHIFNKTVDYLRKMLSSVIKLPVQRIDADKELEYYGIDSVMIVTMTDNLERVLGPLSKTLFFEYQTLNELAAYFSQNHVDKLIKLFDVSMITSLPTPQSASLIKEPVQSIRAKRSASHHEQIAKTPDIAIIGLSGKYPGADNLQQYWNNLKDGKDCITEIPPERWDYRAYFDADSSKVGKVYSRWGGFLNGVDQFDPKFFHISPHDAQFLDPQERLFLQCAYEVIEDSGYTKDTLVVKDEENPTASVGVFVGIMYEEYQLYGAQSQVLGQQIAFGGHPATIANRVSYYCNFHGPSMAVDTMCSSSSTAIHLACQSLRSNECEVAIAGG

SEQ ID NO: 207 - protein, 377 aa, Paenibacillus polymyxa
  REGION 1..377: note = strain LU17007
MIKRALRESGIDPRALSYIEAHGTGTSLGDPIEIAGLTKAFKDYGTDKHCSIGSVKSNIGHCESASGIAGLTKILLQMQHKKLAPSLHSQTLNPNINFENTPFIVQQELTPWHRPKLHINGELIEHPRTAGISSFGAGGANAHIIVEEYIPQKKVSSKNASIFVPENGEVIIVLSALNEEKLVERAKQLINVIQDSKYSDTHLNAMAYTLQTGREAMVERLAVIVTSMQELKEKLTAFINNPISDGLYRGHTKNHHEILRLFTEDEELDNIVEKWMARKKYTKLVDLWAMGMNINWTKLYKDGHPQRMSLPTYPFSKERYWITPPEVASRAFIQSKDDGHPLLKHYLNLSSDHTHMLADNLSNKNCWNYASERVKSI

SEQ ID NO: 208 - protein, 203 aa, Paenibacillus polymyxa
  REGION 1..203: note = strain LU17007
MKLVILGLLLEGDAHPYEIRRKLTERKMNLYIKIQDGSLYYAIDQLRMEGCIDVVEVVRETNRPDRTIYQITEVGKEKFHQLMKEQFQFTPNMFHPINPAIAFSQFSDLEIIEQELKRCIREQIEFIRNLLDDFVVFRDVMPLAKQHLFLAGHKFGLFQIEWLSQLLEVAKQNRLAEVGIFVEIDLDAEREKINLLESKIFDE

SEQ ID NO: 209 - protein, 136 aa, Paenibacillus polymyxa
  REGION 1..136: note = strain LU17007
MDTIVDDLGEKEALLNDNIAIIGMAGLFPDASELDQLWDILESGRINENVLPTQRNQDLLHYLRWIGLDNGQQPEFQKGAYLNGIDQFDYNFFGISAEEACLMDPGQRLFLQTAWKTMEDAGYGENSLKEAALVYL

SEQ ID NO: 210 - protein, 1004 aa, Paenibacillus polymyxa
  REGION 1..1004: note = strain LU17007
MPHYTYRQMVSDVYPHQVHFLDEGNLAAIQAGGISYLMDWRGTSMVIDTAESSSLLCLQKACQALQYGECDQALVGTFHLNLFPHVQQNPVHTLENKGYFPGEAVVSVLIKPLSRALEDGDMIHAVVKGSAVIQSGRYQSVQDQQSTACELLIRAWHNASIHPDTLSFIETNHDINLVDSLQEMQGIEQAFSYFTSQKKSCPVSSIHSQFGMSYHASGLVSLFKAVLSLQNKKIHPPFHKAYPYDVKSDLPSSPHDENRAVKLSAEDYPLRCGVSSYSKSGTHCHIVLEESPLTIQKKQDPPDFPLIFTISAKTEYMLKKLLLVYHSFLIENGNLSLVQLCYTLQTGRTHHVHRAATTFSSREDLILKLKKLSSANFTDLSWSDLYYDSLSADMILDHCDWKRNKNATDLCLAYVRGEEVDWEKLYRKQSVRKMRLPTYPFEPNRCWAEFGGSVPRGETDLFGTQSFEMHVTSEKDVYDGEIVEQIMCHYLGIHQIDDSDDFYRLGGDSITAVKIINDLKKTLNPYIQINDLLENPVLSKFKAAIERKDKGQQTHQDASRKMSHPQSPLSFSQQRLFIMTKYDPQLPIYNMPYSFIVEGDLHKERFEWALNQLLERHETLRTSFTMTDSGPIQTVHEHVVCQLQELYIPLQENELDAALREFTKPFDLQQAPLLRVALVHMVNGQCALFLDMHHIISDGTSLTIFLQELMHFYESNEKLEPLSIQYRDYATQQRLMMETGTSDSEDFWVKQFSGGVPVLQLAADYPRPARKTFHGTQAHYTVNKKATDTILHFAQQTGVTPYVILLTVYHLLLSQMSGQQDIVIGSWTQGRSEQELSQIIGMFVQTIPLRNNSSEATTFIEFIKQVQRNVLQAFQHQEYPLEALIERLQLKRDQSRNPLFDVVFTMQNMDLPVLKSENLTLKVRPFNNTISMFDLTLYIYNWEGQFECIWEYNTALFIEETITRTADDYFQLLMRLIHNSDEQLTEILKLSDHEIDIENVEFNF

SEQ ID NO: 211 - protein, 1261 aa, Paenibacillus polymyxa
  REGION 1..1261: note = strain LU17007
MENMKRGMVAALTDGSSKHTNFWTNILDPEVLISTFPYDFEPSSETTLTENKLKEISRVLPLPVTSSLNEMSGKSELGTYMILLSGVMYLLARYTGSEDLVIAAPKMKPKNGSAYINEPILLRSCMKPQLTVREWLTIVKDTVSDAFKHQSIAFARMAEYIGIVTDPQGKHVVETLVQFDSIHSTEEMTNIHAHTRFRFFKMGGHLAVKVSYYEELFNAGTLERLLDALFMYLEGIIHNSEMYLYDIPLLTKKNLDEIMYEFNSIQTDTQLGGITVDQLIQPQLLARSDQVALIFENRKLTYQEINEQANQLARYISQKNMEKPVAVYMGRSPFILPAILGILKAGTTYVPIDPMIPTARSQSIIEEAEISIIVTTSAYKKNLSTINDHEGNDPIVLCLDTDDISDSYFPATYAPLSPDDERLAYIIFTSGSTGKPKGVEIQHKAVVAFLDGINEVIKPALTSVMLNVTSLSFDIFMVESLYCLLHGITIVMASDQENMDPVEIERLVRQHNVDLTQLTPSRLQLLLNHPSGREALSRLNKILIGGEEFKQQALKQLRTLTSASIINVYGPTEATVWATAAELNESDVVTIGRPLNNYACYIIDDFNHLQPVGAIGELAISGKALAKGYLNNPEQTALKFIQNPLQKNERLYKTGDRARWTSSGMIQCLGRADNQVKVGGYRIELGDIEVAILSHPDILEAKVIVKPNESGELLLVAYLVSDHSWTMDAIHKYLQSKLPNYMIPARIFQIPVMPLSVSGKADTAVLKGWSGDTLPQNEYRAPENEVQLYLSEVWKNILNLKRVGIKDDFFQIGGSSLSAIKMIAHLSDQYTVSINDIFAYPTIEQLSLHVAEQQGYFQQIINEMKNAPIPKRDNMDSLLQYYRSNIQLYDSEILKQRKKYENIFLTGGTGFLGCHLIYELLHKTTAQLTLLVRPVSGEIPENRVRNRMRCYFEQASDELRWDRVTIIAGDLTEPRLGLSQERYEQLARETDCIIHAGALIKHYGTVKEFNEINVSGTQAVIDLAKVGQSKDLHHISTVSIGIGSELEIFHEFTEENGNVDNLYLQSKGEAEALIRKERKNGLSCTIYRLNSLHPSKKLQKFMINKEGNGFNNFVKGLAELQLYPDLNEPVLDLTGADQAAEAIVKLFDHPAVHNLNHHIFNPNRISWAGFAKMLHNNNNSFQLVPYAIFIQNLADAFEQPATRNSVINVILNLFLLRNTQIIGYARVCEQTQYILTELGFSWGAIDMSQVEIYKNLYQNTQ

SEQ ID NO: 212 - protein, 124 aa, Paenibacillus polymyxa
  REGION 1..124: note = strain LU17007
MKKQMNEQIVELPAMLPCDVSYDFKLSMGKTSGVQIQLYICCEQADIEKIYYQLTPKSKQDPLFIRLIGQGLIGLSIEELNAMDRDDIDRFLENSNVPVSAEYVQFVSTFIQKFLDSYFNRFFT

SEQ ID NO: 213 - protein, 472 aa, Paenibacillus polymyxa
  REGION 1..472: note = strain LU17007
MFFSRKIFWIGLACVVVSTTGCAANQESSASTQSSSNVPVVQIHQITKESLQTSSELSGVLMAGEERTLSFENGGRIVSTEVAIGSKIAKGSILARLDEADDRLQIEQSADNIADAIAGIESADARIQSANASISAAEAGIATAEANASKVKNGARRQEKAQAQAAVDKAQSAYVKAQTDARRINQLYEAGASSLSDHESTQLAALNAAKDLEQAKDKLSLLVEGATQEDYRTSQAAVKEAQAARISAIADQAQAKASGKQAKANYEKALLSKKLAELNLSKSQLIAPFNAVVLKKAANAGELVASGQTIYQIGSIQKLKVLLPVPDSEIFNWKKGQSVQISLYDEIKKGKITNIYPTTNADTGTINVEVSVANDDHNWVPGQVVKAAHKSVERQSFLIPTEAVIQQGKQTYVFKIAHNKAVKTQVKLGDHVTANKLEISSGVSEGDVIVVKGASTLFDGDKVEVVEGGQHD

SEQ ID NO: 214 - protein, 510 aa, Paenibacillus polymyxa
  REGION 1..510: note = strain LU17007
MIEFIIRKRKITLLFFLMAIIVGLFSFFRLPHQEMPDVVVQKALVTVTYAGASPQKVEQTITKILEHRIKEVKGVSKITSTSANNYASILVESEDGTDPQSVWDNMRKKVQDAETDLPKGADVPVINDNLTSSFIGAYAITSDSLQTLYQLNDLMTTWKDKLSEVQGVSNVDMDGLPDREVRIDLNAQKMQLYHLSWEQVSQAISAQIDRVPIGDVQYNERSYQLIIDEPTNADELNQTIVAQNHDGVPIYLKDIGSAQLAHAKADSFSYVDGKPAITINVGAEIGSDVPAMSDKVNARIAELQKTLPTGVHFQTLFSQRKHVGELFEDLSRETWISIISVIVICTLGLNLITSAFVALAIPVSIAIGIIFLPIFGVTLNQISIIGLIIVLGILVDDAVVVNDNIERRLSDLQESPDEAALRGTKEVSISILTATLATISAFAPLLFLSGDIGAFIKPIPVIISLTMLGSMIMSLTVIPICRDGMKLGEEEKEKVMTKKFQDCSVVKFNG

SEQ ID NO: 215 - protein, 455 aa, Paenibacillus polymyxa
  REGION 1..455: note = strain LU17007
MDSKAAGNREGFIFCRRAAPLLYSDLGSSAPEGDIYGQIGVTGKKGIFDLKKSVSSWNKYFRKNYPGVSIKPIIPEMGVPVGKPISVRITGSDVNQLQSLSQKVKESIAKVNGTSNIEDDIGLERNALELKVNKLAMDQHLINYTNLTQTLMLLNEGVNMSKFDTGNELVDTKMFLNQKQGIDPNVLLQQLSVINAAGNQVPLSQLVQVRPSFAVQQIKHYNLERTITVEADVTNRTATEAVNDVTAILSKMKFPEGYSWQIGGETSDQSDIFMDLAVLSIVVLFLIVLLITMQFYSVSIAAIIMTSVYLAAAGGILGIFLTGKPIGFMSIMGIIALAGIVVRNGIVLIEFIEDARKEGASLHEAVIRATVARFRPILLTSMTAIVGMLPIAIMGSMLFKPLVYTVISGLFFSTLLTLLVVPSLYMVVAQLKLKRLQKKLSRITPTSGQGPSTNV

SEQ ID NO: 216 - protein, 5390 aa, Paenibacillus polymyxa
  REGION 1..5390: note = strain LU17007
MTQHDVQLFALSQPQQRIWYTELVYPNRNTSTIITTVKIKGTVRIDALQQAMNRVIARNDSFRIKITVWDGIPYQYVEPFANQSIETLQVTQEEAELWVSHHNAQPFPLLDSQLYRFVILQLGAEDTWFSFKMHHIISDGVTMEQAINEITGNYMNIVHGTGSDAPVPANSYLDFIQTEQSYEQSERYQKDKMYWTEKFANLPEVTGLKSYNPLTVSTAARRETYTLEHELYCGVTAFCEAHNISIFTFFLAALYIYLHKTTGEQDLTVGTLYANRTLKKEKNTMGMFVSTVATRLQVEPESELLTFLQGVGKEQSSILRHQRYPYNKIIQDLREQQSGTDIGRLFGVTIQYRTLSFSRFDEAVQQVHTDFCGDTVSDFDIAMIDMLDDDKLVLQLDYRTELFSEQEIARMIHQFLSVVEHMVKGPQQRIQELSLMSDKERAQIMNVFNATTVPFPDDVGIHELFKKQAECTPDQTAVMFGSQSLTYRELNERSNSLARMLQAQGVGPDKLVGLMMQRSVEMIVGLLAVLKAGGAYVPIDPEFPSSRIEYMLEDSKAAVLLTSRDLAEEHHCQANTMFLEDAELYQGDSCNLEVISHPEHLAYVIYTSGSTGNPKGVMLQHRSVLNFITGMREIIDFEAGKTILSLTTISFDIFVLETILPLLAGMTVVLGDHQHQLDPQALGELITHHSIEMLQMTPSRLQMLLDHEAGSRALRGVKEIMVGGEALPSKLLAALQEINGPRIYNMYGPTETTVWSTVQELTHAQEINIGRPIANTQIYIINANGELQPVGVPGELCIAGEGLARGYWNLEDLTAEKFVNNPFAGDKAGYERMYRTGDLARWTLDGNIEYLGRMDHQVKIRGYRIELGEIESQLLQVESVREAAVVARVDETTGQKQMVAYYVASQAMEASKLRSELGRELPSYMVPSYFIQLEQMPLTPNGKIDRKSLPAPEGSQQSGADYEAPHTAREQALATIWQSVLGVPTVGILDNFFDLGGDSIKAIQIVSRAFQAGYKLDMKDLLRCPTIAALAPLMTSRMADQGEVSGETALLPIHHWFFEQEQVDAHHFNRLVMLHREQGFDEAALHQALIQLTEHHDALRMVFRKTEQGYQAWNRGIQEGELYHLDVLDFRDLTDEVILSTKIETKATEIQNNINLSEGPLVKLALFRCTDGDHLLVAIHHLVVDGVSWRILLEDLASGYEQALRDESVRLPNKTDSFRLWADQLAAYANSTALEKERAYWEQVERAGAAQEALPKDYTRKSQAKPQLRDDRTLTVAWTVEETEQFLKQAHRAYNTEANDLLLTALGIAIQEWAGIRQVLVNLEGHGREAILPDMDITRTVGWFTSQFPVVLDMGEDRNVGQRVKNVKEGLRRLPHKGIGYGILRYLADREGKAAFVAEPEISFNYLGQFDQDLKNNAFRMSPYSIGASMSDTLTKRYALDINGMITDGALELTISYSNKMFMKKSIKKLADLLQESLREVLAHCVVKELPELTPSDLSFQGLTAGELDHIVEQTAAAGELENIYSLTPMQKGILFHGLMEPQSGAYFEQATFDLQGSFQVEAFAESLNQLVDRHQIFRTNFYSGWNEQPLQVVYRHKPAGFRFEDIRLMGQEEQDAYIADFAERDKAEGFHFSSGELMRVSILRTGEESYRFVWSFHHILMDGWCLFLVVGEAFNTYFAILEDRKPELVPVTPYSEYIEWLDRQDKTEAERFWRDYFAGFEQQTVLPQVKQLDGHAKAYEADKLSFTLGREVTERMNKLVKQKQVTVNTLLQAAWGVVLQRYNNSRDVVFGSVVSGRSADIPGIDKMIGLFINTVPVRIHSEKDMTFAGLMKQIQEQALASRAYETYPLYDIQALTEQKQDLVNHIIVFENYPVEQRMEQMGSRGANGFTIANASMSEQTNYDFNITVVPGDEIHFHLEYNARVLERAAVEQIREHLLHMIEEAIHRPDARVDELELVTAAEKAKIIDGFGSVGVSAWSDEKQSEGLFHAYVEEQAQLVPDHVAVVYEERQFTYRELNERGNQLARRLRNEGIGRESIVGILSERSVDMLVGVLAVWKAGGAYVPLDADYPSDRIRFMLEDSGATVLLTQTGLQERAQGWLEASRQALVGGQTEGELETAAGAETMERDSLSEGVSLKSDSKSDNEEASEPATGLRLRTVLALDDQSLYTGDVTDIEPINEPHDLAYVIYTSGTTGRPKGVMIEHRSLVNTAAAYRRDYRLNQFPVRLLQLASFSFDVFVGDMARTLYNGGTMVICPKDDRIDPSRLYGWIRDYQITVFESTPALIVPFMQHVHEQGLDMSSMELLITSSDSCSVTDYRVLQERFGADIRIMNSYGVTEAAIDSSFYDEELSKLPSSGHVPIGQAWLNARFYIVDSQLNPVPIGVLGELCIGGAGVARGYLNRADLTAEKFVANPYVPGERLYRTGDLARWMPDGNVDFIGRMDYQVKIRGYRIELGEIETAIQRVPGVRQAVVIDRTDERGNKYLCGYITGEAELRIEEVQAALEAGLPAHMVPARLMRLEIIPLTSNGKIDRKALPEPEGSIHTGAAYVAPRTTVEQVLAAVWAGVLGVEAVGTQDNFFELGGDSIKALQVSSRLLQAGYRLNMKDLFSNPTVAALSPLLRTDGKMASQEEAVGPVELTPIQRWFFEQQPADLHHSNQAMMLYRAGRFDVDALRRTMDRMVQHHDALRTVFRETEQGYVAWNRSVAEGELYTLDIVDFSAVEDESTAVEAKASEIQASIHLSEGPLVKLGLFHCAEGDHLLIVIHHLVVDGVSWRILLEDLASGYEQAVAGQTGTAIRLPHKTDSFQVWAKQLSAYASSATMERELAYWQHIEQAEASLAKPLPKDFANDNALLGDSEVVTVRWTKQETEQLLKQAHRAYNTEMNDLLLAALGKAVYDWSGSERVLVNLEGHGREAIVPDVDITRTVGWFTSQFPVVLDGSLGQGGHTARLIKKIKEGLRHIPQKGIGYGILRYLSDMNMLEKAGVRLQAQPEISFNYLGQFDQDYKGNDLQPSAYSIGVPVSTNATMDFALDINGVIEDGELMFTIRYGTTQFRHETIERLGELLASSLREVIHHCVAQERTMLTPSDVLLNHVTLDELEQLVEDTRDLGELENVYALTPMQKGMLFYSLMDENSAAYFEQATFELNGRFDVVTFGKSFDLLVQRHEALRTNFISSWKDEPVQVVFRNRSGQLYYEDLRGLEKEERKAQVEAFTLADKAKGFNLAEGALIRISILQTGDETYHFIWSFHHILMDGWCLSFMTQEVFGSYLALRAGWEPVLEPVTPFSRFIEWLERQDREAALQYWSGYLADYEQQITLPQQKTQPKSMHVGEYIAEDLDCEFQPELVAQIERVAKQNQVTINTLIQTVWGVLLQKYNNSTDVVFGSVVSGRPGDIPGVEHMIGLFINTIPVRVQSEQGETFVELMKRTQQQALASNAYDAFPLYEIQALAEQKQDLINHIMIFENYPVEQQVEQLGSEGQEPFTISNVVSTEETNYELNVVVMPGEGIKIRFMYNTLSFDQAGIERLYGHFARLLEQISLNPHVRVEELELLTAAEKQQITAAFNDTACAFPCKQTIHQLFEEQVEYTPDQVALVFGHQSLTYRELNERANSLARILQAQGVGPDKLVGLMVHRSVEVIVGLLAVLKAGGAYVPIDPEFPSSRIAYMLEDSEATVLLTNRDLLEEHHCHANAIFLEDKELYQGENGNLETVAQPEHLAYVIYTSGSTGNPKGVMLQHRSVLNFITGMREVIDFEASQTILSLTTISFDIFVLETILPLLGGMTVVLGDSQHQVNPQALGELIAHHHIEMLQMTPSRVQMLLGHEAGSRALQGVKAIMVGGEALPSKLLATLQEINGPRIYNMYGPTETTVWSTVQELTHAQQINIGRPIANTQIFIMNANGELQPVGVPGELCIAGEGLARGYWKREELTAEKFVNNPFAGDKADHERMYRTGDLARWMPDGNIEYLGRMDHQVKIRGYRIELGEIESQLLQMESVQEAVIMARTDETGQTQLVAYYVASQELGANELRQELGQELPSYMVPSYFIWLEQMPLTPNGKIDRKALPAPEGSLHSGADYAVPRTVTERALVAIWQSVLGVPTVGTLDNFFDLGGDSIKAIQIVSRAFQVGYKLDMKDLFRYPTVATLAPHMHETSRMIDQGEVTGETTLLPIQHGFFAQEQVDVHHFNQAVMLHREQGFDESALRQALGKLAAHHDALRMVFSKTEQGYQAWNRGIQEGELYHLDVLDFSNLTDEVMLNTAIETKASEIQSSIQLQEGPLLKAGLFHCADGDHLLMAIHHLVVDGLSWRILFEDLAVAYEQAIREEALQLPDKTDSFRFWSQKLSTYANSATMESEHTYWEQWNAAALLDQVRLPEDQGQAEPFTLADTDTVDFQLTEEETEKLLKQAHRAYNTEVNDLLLTALGMTLYTWTGHERSLIHLEGHGRENILPDTDLSRTVGWFTSQYPVWLDIGRDHALSECIKQVKESLRHIPNKGIGYGIWRYLNESGQAVGQHQAFAEPQVSFNYLGQFDQDLQNSDIRMSPYSMGSVISDRTKMKYTLEVSGIVTNGILELEIRYNGKAFRKDTVQMLADLLKSNLLEMIEHCVTRERTELTPSDVLFKGLTLEQLDTIKEQTKTLGELENVYPLTPMQKGMLFHSLMNAETGVYFEQATFDLEGYFTPSIFEESLKLLVSRHAILRTNFYSGWHGQPLQIVYRHKNPSFFYEDVRGCEQAVAEFVAQDKARGFDLSKDALMRVAVFRTGDRSYRFVWSFHHIVMDGWCLSLMTDEVFGAYVALLENKQPELAPVKPYSDYIEWLEHQDAREATRYWSNYLAGFGQQTLLPSENVQASVVERDEDTDRSGGSSNSGYVSEKLPFMLGKERSATLNRIAKQQHVTINTLLQSVWGVILQKYNNNQDVVFGSVVSGRPAEIAGVENMIGLFINTIPVRICSAPDATFAEVLQRTQEQALASSVYDTFPLYDIQALTEQKQDLIHHIMVFENYPIGQQMKQMGGSGETKAQTGFSIANVALAEQTNYDFNLIVVPDEDISILFEYNALVYNRSAVERIYGHINHVIGQIVDNPHIHVNELELVTPEEQTQIVQVWGDTAAAYSQDQTLSALFEQQAANTPEQVAVLCGAESLTYAELNERANRLARTLRAEGVEPDQPVGILVHRSLDMIVGIYAILKAGGAYVPIDPEYPADRIRFMLEDSGAKLVLTQSHLAEQASLSFDGQVLILDHEDIYHEDGSNLEPLAGSHHVAYVIYTSGSTGKPKGVMVEHYSVLNRILWMHDRYGLSAEDTILQKTAFTFDVSVWELFWWSMVGSKVSLLSVGGEKNPEDIVETIARDGVSTMHFVPAMLHAFLEYVEQQPREVMQAKLGTLRHVFAS

SEQ ID NO: 217 - protein, 420 aa, Paenibacillus polymyxa; identical to SEQ ID NO: 94
  REGION 1..420: note = strain LU17007

SEQ ID NO: 218 - protein, 420 aa, Paenibacillus polymyxa
  REGION 1..420: note = strain E681
MNTFEALESNVRSYCRSFPVVFNKAKNDVLYTEAGKGYIDFFAGAGALNYGHNNDFMKNRILDYLTSDRIMHGLDMYTTAKQEFMESFSERILRPKGLNYKLQFCGPTGTNAVEAALKLARKVKNRNGIFAFMGAFHGMSLGSLSITSNNSMRESAGVPLNNVTFIPYNSTFNGMDTILYMEQLLTDTHSGVEKPAAIILETVQAEGGIHIAETEWLRDLRQLCDDHDILLIVDDIQVGCGRVGSFFSFERAGIVPDMVVLSKSISGYGLPMSLLLLKPELDIWSPGEHNGTFRGNQLAFVGAKAALEFRDTVELEAQVKEKEAFVQQFLREHIQSIDPLIEIRGMGLIWGIDVSHLGEAFAKEVATLCFSRGLIIERAGRNDTVIKIMPALTISFENLRKGCDIIKESMAQVTSTLVTM

SEQ ID NO: 219 - protein, 420 aa, Paenibacillus terrae
  REGION 1..420: note = strain HPL-003
MNTFEALESNVRSYCRSFPVVFNKAKNDVLYTEAGEGYIDFFAGAGALNYGHNNDFMKNRILDYLNSDRIMHGLDMYTTAKQEFIESFSERILQPKGLNYKLQFCGPTGTNAVEAALKLARKVKKRNGIFAFMGAFHGMSLGGLSVTSNNSMRESAGVSLNNVTFIPFNSTFNGLDTILYMEQLLTDTHSGVEKPAAIILETVQAEGGINIADTEWLRDLRQLCDDHDILLIVDDIQVGCGRVGSFFSFERAGIVPDMVVLSKSISGYGLPMSLLLLKPELDIWSPGEHNGTFRGNQLAFVAAKAALEFRDTVGLEAQVKEKEAFVQQFLYEHIQTIDPLIDIRGLGLIWGIDVSPLGETFAKEVAALCFSKGLIIERAGRNDTVIKIMPALTISLENLREGCNIIKESMVQVSSTLVTL

SEQ ID NO: 220 - protein, 420 aa, Paenibacillus polymyxa
  REGION 1..420: note = strain M1
MNTFETLESNVRSYCRSFPVVFNKAKNDVLYTEAGEGYIDFFAGAGALNYGHNNDFMKNRLLDYLTSDRIMHGLDMYTTAKQEFMESFSERILQPKGLNYKLQFCGPTGTNAVEAALKLARKVKKRNGVFAFMGGFHGMSLGSLSITSNNSMRESAGVPLNNVTFIPYNSMFNGMDTILYMEQLLTDTHSGVEKPAAIILETVQAEGGINIADNEWLRELRQLCDDHDILLIVDDIQVGCGRVGSFFSFERAGIVPDMVVLSKSISGYGLPMSLLLLKPELDIWSPGEHNGTFRGNQLAFVGAKAALEFRDTVGLEAQVKEKEAFVQQFLREHIQKMDPLIEIRGLGLIWGIDVTHLGEAFAKEVATLCFSKGLIIERAGRNDTVLKIMPALTISMENLSKGCNIIKESMAQVTSNLVTL

SEQ ID NO: 221 - protein, 420 aa, Paenibacillus polymyxa
  REGION 1..420: note = strain Sb3-1
MNTFETLESNVRSYCRSFPVVFNKAKNDVLYTEAGEGYIDFFAGAGALNYGHNNDFMKNRLLDYLTSDRIMHGLDMYTTAKQEFMESFSERILQPKGLNYKLQFCGPTGTNAVEAALKLARKVKKRNGVFAFMGGFHGMSLGSLSITSNNSMRESAGVPLNNVTFIPYNSTFNGMDTILYMEQLLTDTHSGVEKPAAIILETVQAEGGINIADNEWLRELRQLCDDHDILLIVDDIQVGCGRVGSFFSFERAGIVPDMVVLSKSISGYGLPMSLLLLKPELDIWSPGEHNGTFRGNQLAFVGAKAALEFRDTVGLEAQVKEKEAFVQQFLREHIQKMDPLIEIRGLGLIWGIDVTHLGEAFAKEVATLCFSKGLIIERAGRNDTVLKIMPALTISMENLSKGCNIIKESMAQVTSNLVTL

SEQ ID NO: 222 - DNA, 16662 bp, Paenibacillus polymyxa
  source 1..16662: mol_type = genomic DNA
  misc_feature 1..16662: note = strain Sb3-1
gcgatgctctaccatgacacccttgggctgccccgtcgtacccgacgtataaatcacatacgttagatcgttcggaccggacaacggctccagattggagccatcctcgtgatacacactcggtgccccactcagcaccagcacgtttccattgaaagataccttgtctaccagatggctttgtgtcaacaacaactctgctcccgagtcgtccagcatgtagcggatacgctcctccggatacgttggatcgattggaacatatgcgcccccagctttcaaaatgcctaacatacccacaatcaagtctaccgaacgctcggtcatcagacccaccagccgatccttcgtcacgccttgactgcgcaaggtacgagccagacgattcgcacgttcattcagctcgcgataggtcaactgctctccttcgaagtacaatgctggctgttccggtgtctgcacggcttgtgcttcgaacaagccatggatcgtttgttcgcttggatactcagcggctgtatctccccatccgtggagaatttgctcgcgttcctgctcgcttaacacatccagctcctgcacttgaatgtccggctgcgctaccacctgctccagcagctgtaccagatgaccctgcgtccgttctaccgcttcccgatcatataacttcgcattgtattcgaatcggattttcatcgcttcctgcggcatgacgaccagattgaaatcatagttcgtttgttcaatcatccctgcattgctgatgacaaaatccgattccgcaccttctccaagctgctcgacctgctcctccaccggatagttttcaaacacgataatgtgctggatcagctcttgcttttgctcggtcaaagcttgaatttcatacagcggatacgtttcgtaatcttgagaagccagtgcctgctgctgattcgctctaatcaggtcggcaaaagtgtcctcagctccactgcggatacgtactggaatggtgttaatgaacaagcccaccatattttcgatccctgaaatatctgccgggcgacccgatactacaccgccaaagacggcgtcgttactaccgttgtacttttgaagcagtaagccccatgccgtttgtaggagcgtattggtggtcacgtgatactgcttggctaccatttccaggcgtcctgtcaaatccttacctaggtcgcacagtacatgctcaaattgttcgccgtccgctttcgcgcctacttttccggtcggaatcgaagtttgttgatcatagcccagcaaatattccttccagtatgaggctgctgcttctacatcctgtgcttcaagccactcaatatactgactgtatggagtaacaggggcgagcttcggtgctctatgctctaccgctgcaaagtaaacctcaaacacctcatccgttaccaacgccacgcaccagccgtccattaggatgtgatgagaactccatacaaaataataatcctcatccccggtccgcaaaatcgccacgcgcatcaacgcatcccgggacaaatcgaatccagctgccttgtccttgcgaataaattcctgcacatacgcgtcacgttcctgatcatccaaatgacgcaaatcttcacatctgaaaccaacctctttatggcggaaaatcacctgtacgggctcatcctgccagccgctgatgaaattggctctaaagatctcatgccgctgcgccagttgattcaagctatcttggaaaatatccgcttggaaacgtccgtgtagatcaaaggtcgtttgttcaaaataagcccctgacgctgcatccatcagactatggaacaacatgcctttttgcatcggtgtcaaggcatatacattttccagttccccgatgtcacgcgtccgttcgaccaactgatccagctcggccaaggttacaggtttaagcataacatcgcttggcgtcagctcctgctgtttgcggcccgcgcaatgcgtgatgatttcctgcaggctggttctgagcgcttcagctagccgctccatcgtttccctgcgatattcctgatggctgtagctgatcgtcaattgcaattgaccttccgaaatcaatccgttcagatccagcgtgtgcgatctggctgcatatgcgctaagctcggcaccgctagcgtaaggagacacgccaatggattgatgttgcatatcctgatcaaattgtcccaaatagttaaagctaatttcaggttcggttccaaaacgcttttgctcacatgcggcggacaagtatctcagtatcccgtagccaatgcccttttgcggaatccggtgcagcccttctttcacctgtttgatgcgctgtgaaagatcttgtcctgcgctcatatccagcacaaccgggaattgagtcgtaaaccagcctaccgtgcgcgtaatatccagctctggcaaaatggattcccgtccatggccttccaggttgacgagtacgcgttcgatgcccgcccagcgatgaatagccatgccgagtgcggtcagcagcaaatcattcatatccgtgttgtaggcacgatgcgcctgttttaacaactgctccgtttcctgagtggtccatgtgaccgtcataagctcgctgtctttattcaaggattgtggttgcggctggtcttttggaagcggctcatacgccccctgttccacttcctgccagaaggcgagctctgcttccatttctggaccgttcgcatagtgagactgtgcctcggcccaggtacggaacgaatccgttttgtgcggaagacgagccgcttgtccgtgcaatgcctgttcataggctgtcgtaagatcctcgaacaaaatgcgccaggatacggtatccactactaagtgatgaatagcaatcaataaatggtctccatctgggcaatggaacagccccagcttcaccagtggtccttcgcttaaatgaatgcccgcctgaatttcatttactttggcctcaatcgccgcagacacttcagtctcatggctgaagtctatacgttccagcgtatacagctcaccctcgccaattgcgcggttccaagcttcatatccatgctcggtaaggcggaaaacgatccgcagtgcatcatgatgactaaccatttgatccatcgctgtacgcagcgccgctacattaaaaccgtccttgctatgcagcataatggattggttatgatgatgagcatccgtcaggttttgctcaaagaaccaatgctgaacaggtgtcagcttcacagtgcccaccacttcgctttgatccgccaatcgggtaacggattggactttcagcgccaaggcagacaccgtcggatgactgaacaggtctttcatctccagtcgatagccggcttgcagcaagcgagacgagacttgcagagccttgatcgaatcgccgcccagctcgaagaagttatcctgcgtgcctacggcttccacgctcagcactccggcccataccgcagccagtacttgctccaccttcgtacgcggggccacataagctgctcccgtatggatgctgccttccggttctggcaaggccttgcggtcgattttgccgttgctggtcagcggaatggcctccagacgcatcaagcgtgcaggcaccatgtgcgtggggagtcctgcttccagggctgcctgtacttcctcgatctgcagctcgatttctcccgtaatgtatccacacaaatacttgtgtccacgctcatccgttcggtcgataactacggcttgacgcacacctggcacccgctgaatcgccgtttcaatctcgcccagctcgatccggtagccccggattttgacttgatagtccatccggccaataaagtccacattgccgtctggcatccatcgtgccaagtcacctgtgcgatacaaacgttcccccggtacgtacgggttcgctacgaatttctcggctgtcaggtccgcacagttcaggtagccccgtgcgaccccgatgccgccgatgcacagttcgcccagtacgccgatcggcaccggattcagctggctgtccacgatgtagaagcgtgcgttcagccatgcctggccaatcggcacatggccgctgcttggcagcttcgatagttcttcgtcatagaagctggagtcaatcgccgcttcggtgacgccgtagctatttattatgcggatattcgcaccaaatcgttcttgcagcacccggtaatccgtcacgctgcagctgtccgagctggtgatcagcagttccagactgctcatgtccagcccctgttcatgcacatgctgcataaacggtacgatcagggctggagtcgattcgaacacggtaatctgataatcgcgaatccatccgtacagacggcttggatcaatgcggtcgtctttcggacaaatgaccatcgtgcccccgttatagagcgtccgtgcaatatccccgacgaacacgtcgaaggagaagctggctagttgcagcagtcgtaccgggaactggttcagacggtaatcccggcgatacgctgcagccgtattcaccaagctgcgatgctcaatcatgacgcccttcggacgtccggttgtgccagaggtgtaaatcacatacgccagatcgtgcggttcattgatcggttcaacatccgtcgtatccccggtgtacagtgactcatcgtccaatgccagtacggtatgcagacgcaaccctgttgccgattcggatgctgcttcgctgtcagacttcgaatctgctttcaagctcacaccttcattgaggcggtcgctttccatcgtttcagcgctaaccgctgtttccaactcaccctcggtctttccttcgcccagagccccttggctttcactcagccatgcttgtgcgcgctcctgcaaacctgtttgcgtgagcagcaccgtcgcgccgctatcctccagcatgaaacgaatgcgttcggacggataatctgcatccagcggcacatatgcgcctccagccttccacaccgccagtacgccgaccagcatgtctaccgagcgttcactccaaatgccgacaatcgattcgcgtccgataccttcatttcgcaatctacgcgccagttggttcgcacgctcgttcagtttccggtacgtaagctgttgctcctcgtacaccaccgccacgtgatctggtacaagctgggcctgttcttccacaaagacatggaataagacatctgcttcagcagcaacatccgatacgcctacatctccaaaaccatagaggatttgtgctttttcctcgacagttaccatatccaaagcggacagtgactgctgtgggtgaagtgtaatggcacgtacgagttcagtaaaatgctgcgcaaagcgcgcgatggtctccggcttgtacagcgccgtgctgtattccagactgcacagaataccttctggctgctctacggcatccaaggtcagatcaaatttggacgtatgatcgtccgttggatacggcttgaaggtcagcccttccagctcgaactcctgctgctcaaatgttttcagctcaaacattgtgtcaaacagcgcattccggctcgtatcccgcgttacattcagcttttcaaccagttcttcaaacggatattcctggtgctcatacgcactgagcgcatgctctttgacctcttgcaagtagtccaggaacgttttgtcaccagacggataattacggatcgccagcgtgttcaggaatacgcctactaggctacccagctccgcatgtggtcttccggcaatcggcgtgccgacgatgatgtcctcttgacccgtgtatttatgcaagagtgtgctatacgctgcaagcaataccatgtacaaggtggatccggtttgcgcggccagctgcttcaactgctcgctgtcctccatgcagatcgcaaactcaaatcgagttccttccagacgctgtacggcgggtcttgtaaaatccgttggcatatccagtaccggaatttcaccagacatggtgttcagccaatagctttcttgcgcacgaagacgttcactttgcatatctgcatgctgccaaacggcatagtccttgtactgaatacgcagtggcgggagctccttgccttcgtacaattgagagaactcctgcacgataattccttccgtgacgccatccgaaataatatggtgcatgtcatagagcataacgtgacgccccggtccgtcttcgatcaactgaacccgcagcaacggggcttgtgcgagatcaaaggcacgtacaaagtcctgtgcgtactgcggtgtctcttcttcgcttgcttgcacatactccacgctgaatgggacgttagattcaatccgttgaatcacctcgccatccaccatctcgaatcgggttcgcaaggtttcatgacgggcaatcagctggcggaaggcttgttccagtcgctttttatccaaggaaccttcgataatcaaagctcctggcatgttgtagctcacctctccaccttccaaatgactcagcacgtacatccgtttttgcgccgaggaaacgggataatagtcgcgctcctccgccacaggtatggatacatacatttgctgggcctgatcttcacccatcacctgtaccaattgctcaatcgtcggatattggaaaatatctcgcaaggccagcttgtgattcagctcctgatggattttcgccatcagtgttgtagcgcgcagagaatgtcctcccacttcaaagaagttatcctggatgcctacccgctgatgattcagaacgctttgccaaatacgtaccaattgttcttccagcggtgtgcgcggcgctacgtactctgtgcctccttcgaggcgcgcttccggtgctggcaacgctttgcggtcaattttcccgtttggtgtcagcgggaatcgatccagtggtacgacatacgtcgggatcatatagttcggcagtttaggctggagtgtgctgcgtagctccggcaaattcagcgcctccgaggcgacgacatacgcgcacagatccttctctccgtcttcgttttcccaggcggtgacgatggctttctcaatgccatccacagtcagcagctgcgcttccacctcgcccagttcaattcggaagccccggattttgacctgatcatccatccgaccgataaagtctacattgccgtccggcatccaccgcgccaaatcgcctgtgcgatacagtcgttcgcccggtacgaacgggttcgccacgaatttctcggctgtcagatccgcacggttcaggtagccccgtgccaccccaattccgccgatgcacagctcacccagtacgccaatcggcaccggattcagctggctgtccacgatgtagaaacgtgcgttcagccatgcctgaccaatcggcacatggccgctgcttggcagcttcgacagctcttcatcatagaagctggagtcaatcgccgcttccgtgacgccatagctgttcatgatgcggatatctgcgccaaaccgttcttgcagcacccggtaatccgtcacgctgcagctatccgagctagtgatcagcagttccatgctgctcatgtccagcccctgttcatgcacatgctgcataaacggtacgatcagggccggagtcgattcgaacacggtaatctgataatcgcgaatccatccgtgcagacggctaaaatcaagtcggtcgtctttcggacagatgaccatcgtgccgccgttatagagcgtccgcgccatatccccgacgaacacgtcgaaggagaagctggccagttgcagcagtcgtactgggaactggttcaaacggtactcccggcgatacgccgcagccgtattcaccaaactgcgatgctcaatcataacacccttcggacgtccggttgttccggaggtgtagatcacatacgccagatcgtgcggttcattgatgtgatcgacgtctgtcgtatctcccgtgtacagcgactcgttgtccagcactaatacagtatgcagacacagctttgttgccgattcagatgctgcttcgctgtcagacttcgaatctgatttcaagctcaaaccttcattcaggttgtctctttccatcgtttcaacgctaaccgccgtctccagctcacccttagctttttcatcgcccaaagtccattggctttcattcagccatgcttgtgcgcgctcctgcaatcccgtctgggtcagcaacaccgtcgcaccactgtcctccagcatgaaacgaatgcgttcggacggataatccgcatccagcggtacatatgcgccaccagccttccatactgccagtacgccgaccagcatgtctaccgagcgctcactccaaatgccgacaatcgattcgcgtccgataccttcatttcgcaatctacgcgccaattggttcgcacgctcgttcagtttccggtacgtaagctgttgctcctcgtataccaccgccacttgatctggtataagctgtgcctgtttttccacataggtatggaacatggctcctgcttcaacagcaacatccgttacgcccacttctccaaaaccgtagatgagttgctcttgttcctcatcggttaccatattcaaaactgccagtggctgctgtggatgataggcaatcgctcgaacgatttccgcaaaatgctgtgccaatcgcgtgatggtctcccgcttgtacagcactgtgctgtattccagactgcacagaatgccttccggctgctctatcgcctccaagctcagatcgaattttgccgtttgattatccagtggataggagctcaaggtcagccctttcagctcgaactcccgctgctccaacgttttcaattcaaacatcgtgtcgaacagcgcattccggctcgtatcccgcgctacattcaatttttcaaccaattcttcaaaaggatagtcctgatgctcataagcactgagcgcatgctccttgacctcttgcagatactcaaggaacgatttgtcgctggacggataattgcgaatcgccagcgtgttaatgaagacaccgaccagattactgagctccgcatgcggtcgtccggcaatcggcgtaccgactacaatgtcctcttggcctgtgtatttgtgcaagagtgtggtgtacgcagccagcatcaccatatacagggtagagccggtctgggcagccagttctttcaggcgttcactaacctcacgctccagtacaaattcgatcgtatcccctgctgtactctgcaccgctgggcgggcaaagtccgtagagagatccagcacaggcagttcccctcggaaggtgttcagccagtacgcttcctgacgctgcatccattcctgatgggcttcgctttgctgccatacggcataatctttgtactgaatccgcaatggcgccagctcttcaccgccatacaaacggacaaactcatcagtcaggacctccagggacaccccatctgagacgatatggtgcatatcgagcataagcagatgttgggattcctgttctactccttgaatgcccagatccaccaagcctactcgtagcagcggcgcagctttgagatcaaacggacggacaaagcgccgcaccagctgttgcgcctctatgttgaccctggtgtacgtatctgtagttgtgtcctgatctgtatccgcagtcgcaccctctgcctgtaccttcgtatattccacctcgaacggtacggtgtcctcgatccattgcattggctcactgacgatcagctcaaagcgggtacgcaaggtcgcatggcgggcgatcagttgacggaatacatgttccactcgtttcacgtccagcggaccgctcacttgcagcaccgacggcatgttgtagttcacatcattcggatcgaactgatgcagcacatacagtcgtttttgcgccgaggacaggggatagaagctgcgctcttccgttactggaatggacgcataggttacttggtccagctgttccagtacaacggcctgttgctcaatcgttggtgcttcaaaaatactgcgcagtggaagtggcttgttcagctctttgtgaatcttcgaggccagtgtcgtcgcccgtagtgagtgcccgccaatctcgaagaagttttccttcacaccgacctgagtgagacccagtacatcctgccagatttgcgccagcttcacttccacccatgtccgaggtgcaacatactcggccccgctttgcaggctaccttccggtgctggcagtgccttgcggtcgattttgccattgggactcagtggcatctgctctagctgtacaaagtacgatggtaccatgtagcttggcagctcctgccccagcgcacttctcagctcgctggcactgatttcttgcccggcaacatagtaggccaccatgtgtttttgtcccgtttcgtccgcacgagccatgaccacggcttcgcgtaccgattccacttggagcaactgcgtttccacctcgcccagctcaatccggtacccccggattttcacctgatggtcgatccggcccagatattcaatgttcccgtccggcatccatctcgccaaatcgccggtacggtacatccgctcataccctgcttccccgccggcaaacggatcagctacaaatttctcggccgtcagctctggacggttcagatatcctcgtgctacgccgacaccgccgatgcacagttcccctgcaaccccaatcggctgcaattgctccgtgccttccttcacgatgtacagacggatattttgaatcggtttcccgatcgggatcaccgcatattcctcatccggctcgcaatcgaaatacgatacgtcgaccgttgcttcggttgggccatacaggttgaccagcttcgctccggccaggctcgacacgagccgctggaaccgggccacatgctgtggcggcaacgcttcaccactggcaaagacatggcgcagtgtgcccagcttcgcttgcatcacttctcgtggctgctgttccacatactccaggaacgcatgcagcatggctggtacaaagtgcatcgtagtcacgccatcgcgggcaatcgtgtcgacgatgtcttccgggttcttttccccgccgaccgacagcaggcttacctttgagccgaccatcgaccaccagaacagctcccacaccgacacgtcgaaggtgaaggcggtcttttgcaggatcgtatcttctgcacccaggccgtaccgatcatgcatccacaaaatccggtttaacacggaatggtgctccaccattacacccttcggttttccagtggaaccggaggtgtagatgacataggcgacatggtgcggcccagccaggggctccagatttgaaccatcttcgtgataaatattcttgccagcctgctcctcacggtctagcaccagcacccggccgtcgaaactcagcgatgcttgctccgccagatgcgattgcgtcagcaccagcttcgcgcctgaatcctccagcataaagcggatgcggtcggccggatattccggatcgatcggtacataagctccgcctgctttgaggatcgcatagatacctacgatcatgtccagcgaacgatggaccagaatgcctacaggctgatccggttcaaccccttgcgcacgcaaggtgcgtgcgagacggttggctcgctcgtttagctcacggtaggtcaacatctccgacccgaatattaccgctgcctgatccggtgtaattgctgcctgctgctcaaacagtgcgcttagcgtttgatcctgcggataggctgccgccgtatctccccacacctgaatgatctgtgcctgttcttccggtgtcaccaattccagctcattcacacggatatgcggattgttcacgatttgctcgatgacatgcagtacatgtccctgcatccgctcgatcgtagaccgatcgtatacattggcgttgtatctgaacatgatgcggaaggtgtcatccggcatcacaatcaagtccagatcatagttcgtctgctcaacaacctctacattcgtaatgtcaaatgcagacggacgaacttcacccaactgctcgacttgctcctctaccggatagttttcaaataccataatgtgattaatcagatgctgcttctgctcggtcagcgcctgaatttcatacagcgggaagctgtcatatacccccgaagccagcgcttgctcctgcgtgttccgcatgatgtccacaaacgtggcattccgctcactttgaatccgaaccggaatcgtattaatgaacaaaccgatcatattttctacacccgcaatatccgtcggacgtccagatacgacactgccgaatacaacatcttcattgttattatatttctgcaaaataacgccccacacgctctgcatcagcgtattaatcgtgacctgctgctgcttggcaatccggtacatggcttcgctccacgttggatccagatctaccgttactttttcagaaacatattcgctggcttcgcttgctgtcgaggataccgcatgttccctgctgtccgtcacgtggtctttcgatgcagtatccgatccaggcagcaacgtctgctgttcaaagcctgccaaatagttgctccaatactcttttgccgcacgttcgtcctgacgctccagccattcgatatattggccatacggtgtgatcggagccagctccggctgtttctgctccagcagcgcaaagtacgtaccaaacacttccccggtaacgagcgataagcaccagccgtccatgatgatgtgatggaagctccagacccagtgatacgtctcttcatcggtctgccatacctgtacgcgcatgagtgcatccgtaccgagatcaaagccccgagcctgatcctcctgcttcaacgcctggatatacgcctgttgttctgctggctgcattccgcgtacatccttgaaggacagatcgctatctttgtgacggaacaccagttgcaatggctcctgaccgtgtccggtctcaaaccgatggaaattcgtccgcagcgcttcatggcgctgtgtcagcagatccaggctctgacggaaaacagcaacatcgaagctgcctttttgatcaaacgaggcttgctggaagtatgcgcctgagtccggttccatcaagctatggaacagcatccctttctgcatgggagaaagagcatacacattttccagttcacccacagaagccgtttgctccgtcaattgctccagttgttccaacgacaagcctttgaacaagacatcgcttggcgttagtttgctccgctcttgggaggcacaatgcttgatgacttcctgcaagctttcccgtagcaactgcgcaaacttctctacattttgctgatgatatacttggctgtcatagcgaatttccagggtcagcacgcctgctgtaatcatgccgttcacattcagcggctgctccagcacggtatgatcactcattggctctccatctgaatgcgaagacagcacgatatcgctttgttccaaatcctgatcaaattgtcccaaatagttaaagctgatctcaggctgcagattcaaggaaggatcggcattatccgaagacatatacttcaaaataccgtagccaatgcccttatgcgggacatggcgcaggtcctcttttacccgcttgatgcgctgccctacttctgatgttccatccacatccagcagtaccggatactgactcgtaaaccagcccacggtacgggtgatatccacatctggaacaatagcctcccggccatggccttccagattgaccagcacacgcccctgcccactccagtggtataatgcggtaccgagtgcggttaacagcagatcattgacctctgtatggtacgcacgatgtgattcctgaagcagcagccgggtgtcctgttcgctccaagccacggtcaccgtctcactgtctcgaacccaaaaatgctggcctgccgctctttcttgatccttaggtagcgagccgacttccgcgtgggcaagacgctgccagtattcgcgttcgttatcgatggccggactgttcgcatattgagacaaccgctctgcccaagtggagaacgaatccgttttataaggcaagcgaatcgcttctccccgaacggcctgctcatatccagtcgcaaaatcttcaaacacaatccgccatgagatcccgtctataaccaaatggtgaatggcaatcagtaaatgatctccatccatgcagcggaaaagtcccagcttcaccagcggtccttcatccagatgaatggagctttggatggcattggctttcatctcaatcgccatcatcacatctgccgtatcttcgacgcctgtcaaatctacaacgtccagatgatacagctcgccttcgttcacaccgcgattccacgcttcatagccctgttcggtctgacggaagaccatacgcagcgcatcatgatgctccgtcacctgggtcaccgtgcgatgcaatccatctatatcaaagccttctgctcgatgcagcattaccgactggttaaaatagtgcggctctgccgacgatagtccaaagaaccactgctggatcggggtcagcttgacgttgcccgaaacctcgccctgatcggccgtacgactaactgggtgtacatgaccactcagcagcgaaatggatggatattggaacaaatccttcatgtccagcttgtagcccgcttgcagcaagcgggaggatacctggattgctttgatcgaatcgccgcccagatcaaagaaattatccaaaataccgatgttcttcgttcctaatacagactgccaaatcgaagccaacgtctgctccagcgctgtgcgcggctctacataatccgctccgctttgcagactgccttccggtgttggcagggccttacggtcgattttgccattcggtgtcagcggcatctgctccaactgaatgaaatacgaaggcaccatgtagtttggcagctcctcacccaggaagctgcgcagttccccagcgcttacgtctctttcagcgacatagtacgccaccagttggttttgcccctgctcgtccgcttgggctagtacgatgacctcttgcacgtcttccactttcagaatttgtgcctcgacttcgcccagttcgatccggtagccccggatttttacctgatggtcgatccggcccaaatattcgatgttgccgtctggcatccatcttgccaaatcccccgtacggtacattcgttcatagccggcttcacccgccgcaaacgggttcgctacaaatttctccgccgtcagctctggacgatccagataaccacgcgccagacccggaccggacacgcacagctcacccgctacgccgaccggcgccaaatgtccatggatatccaccatgtatacccggtgattcggcacagggcgtccgatggaaatgagctgtcctgccctcgcatcctcggataccggccaaatggatgttgccaccgagttttcggttggaccgtagccattgtaatacgccacctgctccttccacttgtataccagttcggtggaagatgctgaacccgcagtgaacagaatacgcaggcttggcatccgctgcggctccagatacaccgcataggtcggtggcaaagcggccaccgtgatgtggtgatccgccatatattgctcaaaccgctcgtagttcaaaatcgtctctgttgttggcacgtataacgtagccccgcagaacagcgcctggaagatttcccagcaagccgcatcgaacgaatagctggcaaacagcagtgcatgatccgttgtactaatcttgagtgtctgatcaaaatacgttttcagattgcacagcccgtggtgctccagcataacgcccttcggctgtccggttgtacccgacgtatagattacatacgccaaatcgttcggaccagacagcggctccagattggaaccatcctcgtggtacacctcctgctctccatccaataccagtacttgaccatcgataactgctttgtccatcagatgactttgtgttaacagcagcttcgcacccgagtcgtccagcatatagcggatacgttcctccggataggttggatcaatgggcacatatgcacctccggcttttaaaatcccgaagatacccacaatcatgtccaccgaacgctcggtcatcagacccaccagccgatccttcgtcacgccttgactgcgcaaggtacgagccaatcgattcgctcgttcattcagctcgcgataagtcagcgtttctccttcaaagaacaaggctgtctgctccggtgtctttaatgcttgcgcttcgaacaagccgtgaatcgtttgctcgcttgcataggctgccgctgtattcccccaaacctcaacgatttgcttacgctcctgcatcgtaaccatgtccagttcatgtacgcgaatattcggattcgctgtcacctgctccagcaactgcaccagatgacctcgaatttgctcgacactttcccgttcaaaggccacaggcattatagccaaagctcatatgatggtgttcccggcagcactacaacgtaaagtcatagt

SEQ ID NO: 223 - DNA, 19931 bp, Paenibacillus polymyxa
  source 1..19931: mol_type = genomic DNA
  misc_feature 1..19931: note = strain Sb3-1
gcgatgctccagcataacccctttcggctgtcccgtcgtacctgacgtataaatcacatacgctagatcgttcggaccagacaacgactccagattggagccatcctcgtgatacacactcggtgccccactcagcatcagcacgtttccattgaaagataccttgtctaccagatggctttgtgtcaacaacaactctgctcccgagtcgtccagcatgtagcggatacgctcctccggatacgttggatcgattggaacatatgcgcccccagctttcaaaatgcctaacatacccacaatcaagtctaccgaacgctcggtcatcagacccaccagccgatccttcgtcacgccttgactgcgtaaggtacgagccagacgattcgcacgttcattcagctcgcgataggtcaactgctctccttcgaagtacagcgctggctgttccggtgtctgcacggcttgtgcttcgaacaagccatggatcgtttgatcgcttggatactcagcagctgtatctccccatacacggagaatttgctcgcgttcctgctcgcttaacacatccagctcctgcacttgaatgtccggctgcgctaccacctgctccagcagctgtaccagatgaccctgcgtccgttccaccgcttcccgatcatataacttcgcattgtattcgaatcggattttcatcgcttcctgcggcatgacgaccagattgaaatcatagttcgtttgttcaatcatccctgcattgctgatgacaaaatccgattccgcaccttcgccaagctgctcgacctgctcctccaccggatagttttcaaacacgataatgtgctggatcagctcttgcttttgctcggtcaaggcttgaatttcatacagcggatacgtttcataatcttgagaagccagcgcctgctgctgattcgctctaatcaggtcggcaaaagtgtcctcagccttactacggatacgtactggaatggtgttaatgaacaagcccaccatgttttcgatccctgaaatatctgccgggcgacccgatactacaccgccaaagacagcgtcgttactaccgttgtacttttgaagcagtaagccccaggccgtttgtaggagcgtattggtggtcacgtgatactgcttggctaccatttccatacgtcctgttaaatccttacctaggtcgcacagtacatgctcaaattgttcgccgtccgctttcgcgcctacttttccggtcggaatcgaagtttgttgatcatagcccagcaaatattccttccagtacgaggctgctgcttctacatcctgtgcttccagccacgcaatatactgactgtatggagtcacaggggggagcttcggtgctctatgctctacggctgcaaagtaaacctcaaacacctcatccgttaccaacgccacacaccagccgtccattaggatgtgatgagaactccatacaaaataataatcctcatcacctgtccgcaaaatcgccacgcgcatcaacgcatcccgggacaaatcgaatccagctgccttgtcctggcgaataaattcctgcacatacgcgtcacgttcctgatcatccaaatgacgcaaatcttcacatctgaaaccaacctctttatggcggaaaatcacctgtacgggctcatcctgccacccgctgatgaaattggctctaaagatctcatgccgctgcgccagttgattcaagctatcttggaaaatatccgcttggaagcgtccgtgtagatcaaaggtcgtttgttcaaaataagcccctgattctgcatccattagactatggaacaacatccctttttgcatcggtgtcaatgcatatacattttccagttccccgatgtcacgcgtccgttcgaccaactgatccagctcggccaaggttacaggtttaagcatcacatcacttggcgtcagttcctgctgtttgcgacccacgcaatgcgcgatgatttcctgcaggctggttctgagcgcttcggctagctgttccatcgtttccttgcgatattcctgatggctgtagctgatcgtcaattgcaattgaccttcggaaatcagtccgttcagatccagggtgtgcgatctggctgcatgtgcgctaagctcggcaccactagcgtaaggagacacgccaatggattgatgttgcatatcctggtcaaattgtcccaaatagttaaagctgatttcaggttcggttccaaaatgcgcttgctcacatgctgcagacaggtatctcagcatcccgtagccaatgcccttttgcggaatccggcgtagcccttctttcacctgtttgatgtgctgtgaaaggtcttgccctgcgctcatatccagcacaaccgggaactgtgtcgtaaaccagcccaccgtgcgcgtaatatccagctcgggcaaaatggactcccgcccatggccttccagggtgacaagcacacgttcaatccccgcccagcgatgaatagccgtgccaagtgcggtcagcagcagatcattcatatctgtgttgtaggcacgttgcgcctgttttaacaactgctccgtttcctgagtggtccatgtgaccgtcataagctcgctgtctttattcaaggattgtggttgcggctggtcttttggaagcggctcatacgccccctgttccacttcctgccagaaggcgagctctgctgccatttctggaccgttcgtatagtgagactgtccctcagcccaggtgcggaacgaatccgttttgtgcggaagacgagccgcttgtccgtgcagtgcctgttcataggctgtcgtaagatcctcgaataaaatacgccaggatacggtatctactactaagtgatgaatagctatcagcaaatgatctccatcggggcaatggaatagccccagcttcaccagcggtccttcgcttaaatgaatgcccgcctgaatttcatttgctttagcctcgatcgccgcagacacttcagactccttcctgaagtctgcctgatccagcgtatacagctcgccctcacccaccgcgcggttccaggcttcatatccgtgctccgtaggacggaaaacgatccgcagtgcatcgtgatggctaacgatgtggtccatcgctgtgcgtagtgctgcctcatcaaaaccatccttgctatgcagcatgatggactgattatgatgatgagcatccgtcaggttctgctcaaagaaccaatgctgaacaggtgtcagcttcacagtgcccaccacttggctctgatctgccaatcttgtcaccgattggactttcagcgccaaggcagacaccgtcggatgactgaacagatctttcatctccagtcgataacctgcttgcagcaagcgggacgagacttgcagggctttgatcgaatcgccgcccaactcgaagaagttatcctgcgtgcctacggcttctacgccgagcactccggcccataccgcagccagtacctgctccaccttcgtacgcggggccacataagctgctcccgtatggatgctgccttctggctccggcaaggccttgcggtcgattttgccgttgctggtcagtgggatcgtctccagccgcatcagacgtgctggcaccatatgcgctggcagtccggcttccagctcggtctgtacttcctcgatccgcagctcggtttctcccgtgatgtatccgcacaaatacttgtgcccacgctcatccgttcggtcgatgactacggcttgacgcacacctggcactcgctggatcgccgtttcaatctcgcccagctcaatccggtatccccggattttgacttgatagtccatccggccaataaagtccacattgccgtccggcatccaccgtgccaagtcacctgtgcgatacaaacgttcacccggcacgtatgggttcgctacgaatttctcggctgtcaggtccgcacggttcaggtagccccgtgcgaccccgatgccgccgatgcacagttcgcccagtacaccgatcggcaccggattcagctgactgtccacaatgtagaagcgtgcattcagccatgcctgaccaatcggcacattgccactgcttggcagcttcgatagttcttcgtcatagaagctggagtcaatcgccgcttcggtgacgccgtagctgttcatgatgcggatattcgcaccaaatcgttcttgcagcacccggtaatccgtcacgctgcagctatccgagctggtgatcagcagttccagactgctcatgtccagcccctgttcatgcacatgctgcataaacggtacgatcagggctggagtcgattcgaacacggtaatctgataatcgcgaatccatccgtacagacggcttggatcaatgcggtcgtctttcggacaaatgaccatcgtgcccccgttatagagcgtccgtgcaatatccccgacgaacacgtcgaaggagaagctggctagttgcagcagtcgtaccgggaactggttcagacggtaatcccggcgatacgctgcagccgtattcaccaagctgcgatgctcaatcatgacgcccttcggacgtccggttgtgccagaggtgtaaatcacatacgccagatcgtgcggttcattgatcggttcaacatccgtcgtatccccggtgtacagtgactcatcgtccaatgccagtacggtatgcagacgcaaccctgttgccgattcggatgctgcttcgctgtcagacttcgaatctgctttcaagctcacaccttcattgaggcggtcgctttccatcgtttcagcgctaaccgctgtttccaactcaccctcggtctttccttcgcccagagccccttggctttcactcagccatgcctgggcacgctcctgcaaacctgtttgcgtgagcagcaccgtcacaccgctatcctccagcatgaaacgaatgcgttcggacggatagtctgcatccagcggcacatatgcgcctccagccttccacaccgccaaaacgccgaccagcatgtctaccgagcgttcactccaaatgccgacaatcgattcgcgtccgataccttcatttcgcaatctacgcgccaattgatttgcacgttcattcagtgtgcggtacgtaagttgttgctcttcgtacaccaccgccacatgatccggtacaagctgggcctgttcttccacgtaggtatggaacagtgctcctgcttcaaccgcagtaacatctgatacgcctacatctccaaaaccatagaggatttgtgctttttcctcgacagttaccatatccagagctgccagtggctgctgtggatgcagtgtaatggctcgtacgagttcggtaaaatgctgcgcaaagcgcgcgatagtctcaggtttgtacagcgccgtgctgtattccagactgcacagaatgccttctgactgctctacggcatccaaggtcagatcaaatttggacgtatgatcgtccgtcggatacggcttgaaggtcagcccttccagctcgaactcctgctgctcaaatgttttcagctcaaacattgtgtcaaacagcgcattccggctcgtatcccgcgttacattcagcttttcaaccagttcttcaaacggatattcctggtgctcatacgcactgagcgcatgctctttgacctcttgcaagtagtccaggaacgttttatcaccagacggataattgcgaatcgccagtgtgttcaggaatacgcctactaggctactgagctccgcatgtggtcttccggcaatcggcgtgccgacgatgatgtcctcttgacccgtgtatttatgcaagagtgtgctatacgctgcaagcaacaccatgtacaaggtggatccggtttgcgcggccagctgcttcaactgctcgctgtcctccatgcagatcgcaaactcaaatcgagttccttccagacgctgtacagcgggtcttgtaaaatccgttggcatatccagtgccggaatttcaccagacatggtgttcagccaatagctttcttgcgcacgaagacgttcactttgcatatctgcatgctgccaaacggcatagtccttgtactgaatacggagtggcgggagctccttgccttcgtacaattgagagaactcctgcacgataattccttccgtgacgccatccgaaataatatggtgcatgtcatagagcataacgtgacgccccggtccgttttcgatcaactgaacccgcagcaacggggcttgtgcgagatcaaaggcacgtacaaagtcctgtgcgtactgcggtgtctcttcttcgcttgcttgcacatactccacgctgaatgggacgttagattcaatccgctgaatcacctcgccatccaccatctcgaatcgggttcgcagggtttcatgacgggcaatcagctggcggaaggcttgttccagtcgctctttatccaaggagccttcgataatcaaagctcccggcatgttgtagctcacctctccgccttccagatgactcagcacgtacatccgtttttgcgccgaggaaacgggataatagtcgcgctcctccgccacaggtatggatacatacatttgctgggtctgatcttcacccatcacctgtaccaattgctcaatcgtcggatattggaaaatatctcgcaaggccagcttgtgattcagctcctgatggattttcgccatcagtgttgtagcgcgcagagaatgtcctcccacttcaaagaagttatcctggatgcctacccgctgatgattcagaacgctttgccaaatacgtaccagttgctcttccagctctgtccgcggcgcaacatactccgtgcctccttcgaggcgagcttccggtgctggcaacgctttgcggtcaattttcccgtttggtgtcagcgggaattgatccagtggtacgacatacgtcgggatcatatagcccggcagtttgggctggagtgtgctgcgtagctccggcaaattcagcgcctccgaggcgacgacatacgcgcacagatctttgtctccgttttcgttttcccaggcggtgacgatggctttctcaatgccatccacagtcagcagttgcgcttccacctcgcccagttcaatccggaagccccggattttgacctgatcatccattcggccgataaagtctacattgccgtccggcatccaccgcgccaagtcgcctgtgcggtacagtcgttcgcccggtacgtacgggttcgctacgaatttttccgccgtcaggtccgcacggtttaggtagccccgtgcgaccccggctccgccgatgcacagctcacccagtacaccgatcggcaccggattcagctggctgtccacgatgtagaagcgggcattcagccatgcctgaccaatcggcacatggccgctgcttggcagcttcgacagctcttcgtcatagaagctggagtcaatcgctgcttccgtgacgccatagctgttcatgatgcggatatctgcgccaaaccgttcttgcagcacccggtaatccgtcacgctgcagctatccgagctagtgatcagcagttccatgctgctcatgtccagcccctgttcatgcacatgctgcataaacggtacgatcaaagctggagtcgattcgaacacagtgatttggtagtcacgaatccagccatgcagacggctaaaatcaagtcggtcgtctttcggacagatgaccatcgtgcctccgttatagagcgtccgcgccatatccccgacgaacacgtcgaaggagaagcttgccagttgcagcagtcgtactgggaactcgctcaggcgataatcccggcgatacgccgcagctgtattcaccaaactgcgatgctcaatcatgacgcccttcggacgtccggttgttccggaggtgtagatcacatacgccagatcctgcggttcgttgatgtgatcaacgtctgtcgtatctccggtgtacagtgactcatcgtccaatgccagcatgatttgcagacgcagctttgttgccgattcagatgctgcttcgctgtcagacttcgaatctgatttcaagctcaaaccttcattcaggttgtctctttccatcgtttcagcgctaaccgccgtctccagctcacccttagctttttcatcgccccaagtccattggctttcattcagccatgcttgtgcgcgctcctgcaatcccgtctgggtcaacagtaccgtcgcaccactgtcctccagcatgaaacgaatgcgttcggacggataatccgcatccagcggcacatatgcgcctccagccttccatactgccagtacgccgaccagcatgtctaccgagcgctcactcaaaatgccgacaatcgactcgcgtccgataccttcatttcgcaatctacgcgccaattggttcgcacgctcgttcagtttccggtacgtaagctgttgctcctcgtataccaccgccacatgatctggtataagctgggcctgttcttccacataggtatggaacagggttcctgcttcaacagcaacatccgttacgcccacttctccaaaaccgtagatgagttgctcttgttcctcatcggttaccatgttcaaaactgccagtggctgctgcggatgataggcaatcgctcgaacgatttccgcaaaatgctctgccaatcgcgtcatagtctcccgcttgtacagcgctgtgctgtattccagactgcacagaataccttctggctgctctattgcctccaagctcagatcaaacttggccgtatgattgtccagtggataggagctcaagctcagcccttccagctcgaaatcccgctgctccattgttttcagctcaaacatcgtgtcaaacagcgcattccggctcgtatcccgggttaaattcagtttttcaaccagctcttcaaaaggatagtcctgatgctcataagcattaagtgcctgctccttgacctcttgcagatactcaaggaacgatttgtcgctggacggataattgcgaatcgccagtgtgttaatgaagacaccgactagattactgagctccgcatgcggtcgtccggcaattggcgtaccgacaatcatgtcctcttggcctgtgtatttgtgcaagagtgtggtgtacgccgccagcatcaccatatatagggtagagccggtctgggcagccagttctttcaggcgttcactaacctcacgctccagtacaaattcgaccgtatcccctgccgtactctgcaccgctgggcgggcaaagtccgtagagagatccagtacaggcagttcaccttggaaagtgctcagccagtacgcttcctgacgctgcatccattcctgatgggcttcgctttgctgccatacggcataatctttgtactgaatccgcaatggcgccagctcttcaccgccatacaaacggacaaactcatcagtcaggacctccagggacaccccatctgagacgatatggtgcatatcgagcataagcagatgttgggattcctgctctattccttgaaggcccagatccaccaagcctactcgcagcagcggcgcagctttcaggtcaaacggacggacaaagcgccgcaccagctgttgcgcctctatgttgaccctggtgtacgtatctgtagttgtgtcctgatctgtatccgcagtcgcaccctctgcctgtaccttcgtatattccacctcgaacggtacggtgtcctcgatccattgcattggctcactgtcgatcagctcaaagcgagtacgcaaggtcgcatggcgggcgatcagttgacggaatatatgttccactcgtttcacgtccagcggaccgctcacttgcagcaccgacggcatgttgtagttcacatccagcggatcgaactgatgcagcacatacagtcgtttttgcgccgaggatagtggatagaagctacgctcttccgttaccggaatggacgcatacgccacctgatccagaccttccagcacagccgccagttgttcaatcgttggtgcttcaaaaatactgcgcagaggaagctgcttgttcagctcttggtgaatcttcgaggttagtgtcgtcgcccgcagcgaatgtccgccaatctcgaagaagttttccttcacgccaacttgcgccaggcccagcacatcctgccaaatttgcgccagcttcacttccacccacgtccgcggcgggacataatcggctccgctttgcaggctaccttccggtgccggcagtgccttgcggtcgattttgccattgggactcagtggcatctgctccagctgtacaaagtaggacggcaccatgtagcttggtagttcctgccccagcgcacttctcagctcgctggcactgatttcttgcccggcaacatagtaggccaccatgtgtttttgtcccgtttcatctgcacgagccatgacaatcgcttctcgtaccgattccacttggagcaactgcgtttcgacctcgcccagctcaatccggtacccccggattttcacctgatggtcgatccggcccagatattcaatgctcccgtccggcatccatctcgccaaatcgccggtgcggtacatccgctcataccctgcttccccgccagcaaacggatctttcacaaatttctcagccgtcagctccggacggttcagataacctcgagctacgccgacaccgccgatgcacagttcacctgcaaccccaatcggctgcaattgctccgtgccttccttgacgatgtacagacgaatgttttgaatcggtttcccgataggaataaccgaataggctccatcaggctcgcaatcgaagtacgatacgtccaccgtcgcttcggttgggccatacaggttgaccagcttcgctccggccaggctcgacacgagccgctggaaccgggccacatgctgtggcggcaaggcttcaccactggcaaagacatggcgcagtgtgcccagcttcgcttgcatcacttctcgtggctgctgttccacatactccaggaacgcatgcagcatggctggtacaaagtgcatcgtgctcacgccatcgcgggcaatcgtgtcgacgatgtcttccgggttcttttccccgccgaccgacagcaggcttacctttgagccgaccatcgaccaccagaacagctcccacaccgacacgtcgaaggtgaaggcggtcttttgcaggatcgtatcttctgcacccaggccgtagcgatcatgcatccacaaaatccggtttaacacggaatggtgctccaccattacacccttcggttttccagtggaaccggaggtgtagatgacataggcgacatgatgcggcccagccaggggctccagatttgaaccatcttcgtggtaaatattcttgccagcctgctcctgacgatctagcaccagcacctgaccgtcgaaactccgtgatgcttgctccgccagatgcgattgcgtcagcaccagcttcgcgcctgaatcctccagcataaagcggatgcggtcggccggatattccggatcgatcggtacataagctccgcctgctttgaggatcgcatagatacctacgatcatgtccagcgaacgatggaccagaatgcctaccggctgatcgggttcaaccccttccgcacgcagcgtccgagccaaacggttggctcgctcgttcagctcacggtaggtcaacatctccgacccgaatattaccgctgcctgatccggtgtaattgctgcctgctgctcaaacagtgcgcttagcgtttgatcctgcggataggctgccgccgtatctccccacacctgaacgatctgtgcctgttcttccggtgtcaccaattccagctcattcacacggatatgcggattgttcacgatttgctcgatgacatgcagtacatgtccctgcatccgctcgatcgtagaccgatcgtatacattggcgttgtatctgaacatgatgcggaaggtgtcatccggcatcacaatcaagtccagatcatagttcgtctgctcaacaacctctacattcgtaatgtcaaatgcagacggacgaacttcacccaactgctcgacttgctcctctaccgggtaattctcaaataccataatgtgattaatcagattttgcttctgctcggtcagcgcctggatttcatatagcgggaagctgtcatatactcccgaagccaacgcttgctcctgcgtgttccgcatgatgtccacaaacgtggcattccgctcactttgaatccgaaccgggatcgtattaatgaacagaccgatcatattttctacacccgcaatatccgtcggacgtccagatacgacactgccgaatacaacatcctcattgttattatatttctgcaaaatcaggccccacacgctctgcatcagcgtattaatcgtgacctgctgctgcttggcaatccggtacatggcttcgctccacgttggatccagatctaccgttactttttcagaaacatattcgctggcttcgcttgctgtcgaggataccgcatgttccctgctgtccgtcacgtggtctttcgatgcagtatccgatcctggcaacaacgtctgctgttcaaagcctgccaaatagttgctccaatactcttttgccgcacgttcgtcctgacgctccagccattcgatatattggccatacggtgtgatcggagccagctccggctgtttctgctccagcagcgcaaagtacgtaccaaacacttccccggtaacgagcgataagcaccagccgtccatgatgatgtgatggaagctccagacccagtgatacgtctcttcatcggtctgccatacctgtacgcgcatgagtgcatccgtaccgagatcaaagccccgagcctgatcctcctgcttcaacgcctggatatacgcctgttgttctgctggctgcattccgcgtacatccttgaaggacagatcgctatctttgtgacggaacaccagttgcaatggctcctgaccatgtccggtctcaaaccgatggaaattcgtccgcagcgcttcatgacgctgtgtcagcagatctaggctcttgcggaaaacagcaacatcgaagctgcctttttgatcaaacgatgcttgctggaagtatgcgcctgagtctggctccatcaagctatggaacagcatccctttctgcatgggagaaagagcatacacattttccagttcgcccacagaagccgtttgctccgtcaattgctccagttgttccaacgacaagcctttgaacaagacatcgcttggcgttagttcgctccgctcttgggaggcacaatgcttgatgacttcctgcaagctttcccgtagcaactgcgcaaatttttctacgttttgctgatgatatacttggctgtcatagcgaatttccagtgtcagcacgcctgctgtaatcatgccgttcacattcagcggctgctccagcacggtataaccactcatcggctctccgtccgtatgcgaagacagcacgatatcgctttgttccaaatcctgatcaaattgtcccaaatagttaaagctgatctctggctgcaggctccaggaagaggtagcatcatccgaagacatatacttcaaaataccgtagccaatgcccttatgcggcacatgacgcaggtcctctttgacccgcttgatgcgctgcccaatctctgcctttccatcgacatccagcagcaccggatactgactcgtaaaccagcccacggtacgtgtaatatccatatctggaacaatagcttcccggccatgtccctccagattgaccagcacacgctcctgaccgctccagttgtacaatgcgctgccgagtgcggttaacagcagatcattgacctccgtattgtacgcacgatgtgattcctgaagcagcaaccgggtttcctgttcgttccaagccacggtcaccgtctcactatctctgacccaaaaaggctgtcctgctgctttgtcttgatccttaggtagcgatgcaacttccatgtgggcaagacgctgccagtattcgcgttcgttgtcaatggccggactgttcgcatattgagacaaccgttctgcccaagtggagaacgaatccgttttataaggcaagcgaatcgcttctccccgaacggcctgctcatatccagtcgcaaaatcttcaaacacaatccgccatgagatcccgtctataaccaaatggtgaatggcaatcagtaaatgatctccatccatgcagcggaaaagtcccagcttcaccagcggtccttcatccagatgaatggagctttggatggcattggctttcatctcaattgcggctgccacctctgccatgttttgcacatccgtcaaatctacaacgtccagactgtacagctcgccttcgttcacaccgcgattccacgcctcatagccctgttcggtctgacggaagaccatacgcagcgcatcatgatgcttcgtcacctgggtcaccgtgcgatgcaatgcgcctatatcaaagccttctgctcgatgcagcatcaccgactggttgaaatagtgtggctctgccgatgcttgtccaaagaaccactgctggatcggggtcagcttgacgctacccgaaacttcgccctgatcggctgtacggctaactgggtgtacatgaccactcagcagcgaaatggacggatattggaacaaatccttcatgtccagcttgtagcccgcttgcagcaagcgggaggatacctggattgctttgatcgaatcgccgcccagatcaaagaaattatccaaaatcccgatgttcttcgttcctaatacagactgccaaatcgaagccaacgtctgctccagcgctgtgcgcggctctacataatccgctccgctttgcagactgccttccggtgccggcagggccttacggtcgattttaccgttgggtgtcagcggcatctgctccaactgaatgaaatacgaaggtaccatgtagtttggcagctcctcacccaggaagctgcgcagctccccagcgcttacgtctctttcagcgacatagtacgccaccagttggttttgcccctgctcgtccgcttgggccagtacgatgacctcttgcacgtcttccactttcagaatttgtgcctcgacttcgcccagttcgatccggtagccccggatttttacctgatggtcgatccggcccaaatattcaatgttgccgtctggcatccatctcgccaagtcccccgtacggtacattcgttcatagccggcttcacccgccgcaaacgggttcgctacgaatttctccgccgtcagctctgggcgatccagataaccacgcgccagacccggaccggacacgcacagctcacctgctacgccgaccggcgccaaatgtccatggacatccaccatgtatacccggtgattcggcacaggacgtccgatggaaatgagttgtcctgccctttcatcctcggataccggccagatggatgttgccaccgagttttcggttggaccatagccattgtagtacgccacctgatccttccacttgtataccagttcggtggatgaggctgaacccgcagtgaacagaatacgcaggtgcggcatccgcccggctccaaatacactgcataagttggcggcaaagcagccaccgtaatgtggtgatccgccatatattgctcaaaccgttcgtagttcaaaatcgtctctgttgttggcacgtataacgtagccccgcaaaacagcgcctggaagatttcccagcaagccgcatcaaacgagtagctggcaaatagcagtgcatgatccgatcgcacgaatcttgagcgtctgatcaaaatacgttttcagattgcacagcccgtggtgctccagcataacgcccttcggctgtccggttgtacctgacgtatagattacatacgccaaatcgtttcggaccagacagcggctccaggattggaaccatcctcgtggtacaccgatcctgctctcccatccaataccagtacttgaccatcgataactgctttgtccatcagatgactttgtgttaacagcagcttcgcacccgagtcgtccagcatatagcggatacgttcctccggataggttggatcaataggaacatatgcacctccggcttttaaaatcccgaagatacccacaatcatgtccaccgaacgctcggtcatcagacccaccagccgatccttcgtcacgccttgactgcgcaaggtacgagccaatcgattcgctcgttcattcagctcgcgataagtcagctgttctccttcaaagaacaaggctgtctgctccggtgtctttaatgcttgcgcttcgaacaagccgtgaatcgtttgctcgcttgcataggctgccgctgtattcccccatacctcaacgatttgcttacgctcctgcatcgtaaccatgtccagttcatgtacgcgaatattcggattcgctgtcacctgctccagcaactgcaccagatgacctcgaatttgctcgacactttcccgttcaaaggccaaggcattatagccaaagctcatgtgaatggtgtttcccggcagcactaccacgttaaagtcatagttggtctgctcaacagactcggctcctgtgatcgtgaagctggacgcctcactactacctaattgctcaatttgttccttctaccggatagttctcaaaaataagaatatgatggatcaaatcctgcttaagctccgacaacccctgaatttcatacaacggatacgtatcatacacatgggaagcaatcgattgctcctggatgtgcttcatcacgtcggagaatacgctgtccacctgactgcggatacgcaccggaatcgtattgataaacagaccaatgatatgttccacgttcggaatgtctgccggacgtccagataccacgctgccaaacacgacatcatcggtgccattatatttttgcagcaaaaggccccatacggtctgcatcaacgtattgatggtgacctgataacgcttggctatgcgctgaataccagctgtgaggtctgcgcccagatcaaaatccaaacgctctgccgactgataccccgtcttaccctgaatttttgcctgtggcaaacgggactgctcctcatatccttccagaaccttgctccagtagctcgatgcggcctgacgatcctgctgctctagccattcgatatattgactgtacggcgttacaggggctagttcaggttgtttatgggccagtatcgcaaaataactcgcaaacacttcgttggtcaccagtgacaagcaccagccgtccatcacgatatgatggaagctccatacaaaacggtacgcattcctcacctgtgcgcaaaacagccacacgcatcaaagcatcctgcgccagatcaaaccctctttgtttgtcttggcgcgtaaattcgagaatgtactcgttttgcttctcttcctccatatcccgcaaatcctcaacatacagttcgctgcgcttattccggtacacgacctgaagcggttcatccttccagccgctgtagaagttcgtacgcagtactgtatgccgctgcaccaaaacatccaaactggccgcaaaggcagcgatattaaactctcctcgcagatcaaaggaggcctgttcaaaataagctcccgattgcgaatccatcagattgtaaaagagcattcccttctgcatcggcgtcagtgcgtatacattttccagctcaccgatacgtgctgcctgttccgcgatctgttccagctctccagtcgtcagacctttgaaggatacatcacttggcgtcagctgaggctgcttttgagcgacgcaatacgtaatgacctcctgcaaagcggattgcagcagccccgccacctgttccagcgtttctttacgatactgcttacggctgtaagcgatcgtcaagcgcagcttgccttctgagatcattgcgttcaaatccagcgtgtatggcaagcggtgaatgggcatcctctgtctcccctgcacggtaggaggacaacgtaattccactgttttgcagatcctgatcgacctgccccaaatagttaaagctgatttccggttcggctgcgatcgtatccatttcatctgcaggcaacgcagaggacaggtaacgccaagtgccataggtcagccctttatgcggaatgcgccgcaggccttccttcgtttctttaatccgctgagccagtgtcatttctttgccggtctccagcagcactggatacaagctcgtaaaccagcctactgtacgcgtaatatccacctctggcaggatcgtttcccggccgtgtccctccaggttcaccagtacatggcctgcgcctgtccagtggtgcaccgcgagtcccagcgcagtcagcagcaaatcattgacctcggtgttataggcgcgatgtgcctgcttcagcagttgctgggtttcagcttcagtccactccaccgttagcacttcgccgtctgcattcacggagccctcgtaggcaaaatccttaggcagtggtgcagcttcagctttgacctgttccagctgcttccaatagacttcatccgatgcagcctcaggacggttagcataagaggacaactcccgtgcccatttttggaaggaatctgttttatagggcaatcgtacggactcgccctggatcgcctgctcgtagcctgtcgagaaatcttcaaacagaatccgccacgacaccccgtccaccaccaagtggtgaatggcgatcagcagatggtcgccctccgctgtgcggaaccatccgagtttcaccaaaggtcctgcggacaggtccatgctgctttggatttccgttgccttcgcttccagcgcttccgcataagcggcccgttcacggtaatctaccatttccagtgtatataatgtgccttcctctacatggcgagtccaagctgtataaccagcggaagtctgatggaataccgtacgcagcgcatcatgatgcttcacgaggtgatccatggcttggcgaattgccatctcctcaaagccctccgcgcgatagagcatgaccgcttgattaaagtgctgtggacgctcgcgctcctgcgcaaagaaccaatgctggatcggaagtagcgccgtttccccgctgacttcttcctgatctgccatacgacggacctcgtgcatatgcggtgccagggcttcaatggttggatactggaacaaatccttcatgtccagcttatagccagcctggaacgcacgggaggcgatttggatcgccttgatcgaatcaccgcccaggtcgaagaaattgtccagaataccgaccgtctgcagccccagtaccgactcccagacggctaccagagcgcgttcttgcatagtgcgcggctctgcataatcgactccagtttgcaggctgccttccggtgcaggcaaggccttgcggtcgattttgccattcggtgttagtggcagctgttccagttgtacaaagtacgatggcaccatgtagcttggcagctcccgtcccagctcacttcttagctcgctggcctcgactacttgtcccgcgacatagtaggccaccatgtggttttggcccatttcgtccatacgggccacgaccacggcttcgcgtaccgattccacctggagcagctgcgattcgacctcgcccagctcaatccgataacccctgatcttcacctgatgatcgatccggcccagatattcaatgttgccgtccggcatccatctcgccaaatcgccggtgcggtacatccgttcatagcctgctttgcctccggcaaacgggttctctacaaatttctcggccgt

SEQ ID NO: 224 - DNA, 20187 bp, Paenibacillus polymyxa
  source 1..20187: mol_type = genomic DNA
  misc_feature 1..20187: note = strain LU17007
ggtgaagctctaccgtccaagctgtggccaggttccagcggctcgtatcggcctgaccggagcgaacagctgattcacctgtacggccaaccgagcgacggtggacgtatcgtactttgattgcgagccggatgaggaatatacagttatcccgatcgggaaaccgattcaaaatatccgtctgtatatcgtgaaggaaggcacggagcaattgcagccgattggtgtggcaggggaactgtgcatcggcggtgtcggcgtagccagaggttacctgaaccgtccggagctgacggccgagaaatttgtagagaacccgtttgccggaggcaaagcaggctatgaacggatgtaccgcaccggcgatttggcgagatggatgccggacggcaacattgaatatctgggccggatcgatcatcaggtgaaaatcaggggttatcggattgagctgggcgaggtcgaatcgcagctgctccaggtggaatcggtacgcgaagcggtcgtcgtggcccgtatggacgaaatgggccaaaaccacatggtggcctactatgtcgcgggacaagaagtcgaggccagcaagctaagaagtgagctgggacgggagttgccaggctacatggtgccatcctacttgtacaactggaacagctgccactgacaccgaatggcaaaatcgaccgcaaggccttgcctgcaccagagggcagcctgcaaaccggagtcgattatgccgagccgcgtacggcgcaagaacgcgctttggtagccgtctgggagtcggtactggggttgcagacggtcggtattctggacaatttcttcgatctgggcggtgattcgatcaaggcgatccaaatcgcctcccgtgcgttccaggccggctataagctggacatgaaggatttgttccagtatccaaccgttgaagccctggcaccgcatatgcaagaggtccgtcgtatggcagatcaggaagaagtcagcgggaaacggcgctacttccgatccagcattggttctttgcgcaggagcgcgagcgtccacagcactttaatcaagcggtcatgctctatcgcgcggagggctttgaggagatggcaattcgccaagccatggatcacctcgtgaagcatcatgatgcgctgcgtacggtattccatcagacttccgctggttatacagcttggactcgccatgtagaggaaggcacgttatatacactggaaatggtagattaccgtgaacgggccgcttatgcggaagcgctggaagcgaaggcaacggaaatccaaagcagcatggacctgtccgcaggaccttggtgaaactcggatggttccgcacagcggagggcgaccatctgctgatcgccattcaccacttggtggtggacggggtgtcgtggcggattctgtttgaagatttctcgacaggctacgagcaggcgatccagggcgagtccgtacgattgccctataaaacagattccttccaaaaatgggcacgggagttgtcctcttatgctaaccgtcctgaggctgcatcggatgaagtctattggaagcagctggaacaggtcaaagctgaagctgcaccactgcctaaggattttgcctacgagggctccgtgaatgcagacagcgaagtgctaacggtggagtggactgaagctgaaacccagcaactgctgaagcaggcccatcgcccctataacaccgaggtcaatgatttgctgctgaccgcgctgggactcgcggtgcacaactggacaggtgcaggacatgtactggtgaacctggagggccatggtcgggaagcgatcttgccagaggtggatattacacgtacagtaggctggtttacgagcttgtatccagtgctgctggagaccggcaaagaaatgacactggcagagcggattaaagaaacgaaggaaggcctgcggcgtattccgcataaagggcttacctatggcacttggcgttacctgtcctctgcgttgcctgcagatgaagtgggcacgatcgcagcagaaccggaaatcagctttaactatttggggcaggtcgatcaagatctgcaaaacagtggaattacgttgtcctcctaccgtgcaggggaaacagaggatgcccattcaccgttactgtacacgctggatttgaacgcgatgatctcagaaggcaagctgcgcttgacgatcgcttacagccgtaagcagtatcgtaaagaaacgctggaacaggtggcggggctgctgcaatccgctttgcaggaggtcattacgcattgcgtcgctcaaaagcagcctcagctgacgccaagtgatgtatccttcaaaggtctgacgactggagagctggaacagatcgcggaacaggcagcacgtatcggtgagctggaaaatgtatacgcactgacgccgatgcagaagggcatgctcttttacaatctgatggattcgcaatcgggagcttattttgaacaggcctcctttgatctgcgaggacattttaatatcgctgcctttgcagccagtttggatgtcttggtgcagcggcatacggtactgcgcacgaacttctacagcggctggaaggatgaaccgcttcaggtcgtgtaccggaataagcgcagcgaactgtatgttgaagatttaagggacatggaggacgagcagcaaaacgagtacatcctcgaatttacgcgccaagacaagcaaagaggctttgatctggcgcaggatgttttgatgcgtgtggctgttttgcgcacaggtgaggaatcgtaccgttttgtatggagcttccatcatatcgtgatggacggctggtgcttgtcgctggtgaccaacgaagtgtttgcgagttattttgcgatactggctcataaacaacctgaactggcccctgtaacgccgtacagtcaatatatcgaatggctggaacagcaggatcgtcaggccgcatcaagctactggagcaaggttctggaaggatatgaggagcagtcccgtttgccacaggcaaaaattcagggtaagacggggtatcaggcggagcgtttggattttgatttgggcgcagacctcacagctggtattcagcgcatagccaagcgttatcaggtcaccatcaatacgttgatgcaaaccgtttggggccttttgctgcaaaatataatggcaccgatgatgtcgtgtttggcagtgtagtatctggacgtccggcagacattccgaatgtggagcatatcattggtctgtttatcaatacgattccggtgcgtatccgcagtcaggtggacagcgtattctccgacgtgatgaagcacatccaggagcaatcgattgcttcccatgtgtatgatacgtatccgttgtatgaaattcaggggctgtcggagcttaagcaggatttgatcaaccatattcttatttttgaaaattatccggtagaggaacaaatcgagcaattaggtagtagtgaggcgtccagcttcacgatcacaggagccgagtctgtcgagcagaccaactatgactttaacgtggtagtgctgccggggaataccattcacatgagctttggctataatgccctagcctttgaacgggaaagtgtggagcaaattcgaggtcatctggtgcagctactggagcaggtgacagcgaatccgaacattcgcgtacatgaactggacatggttacgatgcaggagcgtaagcaaatcgttgaggtgtggggcaatacagcggcagcctatgcaagcgagcaaacgattcacggcttgttcgaggcgcaaaccgcgcagacgccagagcagacagccttgttctttgaaggagagcagctgacttatcgcgagctgaatgaacgcgccaatcgattagcgcgtaccttgcgcagtcaaggcgtgacgaaagatcgtttggtgggtctgatgaccgagcggtcggtggacatgcttgtgggcatcttcgggattttaaaagccggaggcgcctatgttcctatcgatccaacctatccggaggaacgtatccgctatatgctggatgactcgggagcgaagctgctattgacacaaagtcatctggtggacaaagccgttatcgacggtcaagtgctggtattggatggggaacaatcggtgtaccacgaggatggttccaacctggagccgctgtctggtccaaacgatttggcgtatgtgatctacacgtcaggtacaaccgggcagccgaagggcgtgatgctggagcaccacgggctgtgcaatctgaaaacgtattttgatcagacgctcaagattcgtgcgtcggatcatgcgctgctatttgccagctactcgtttgatgcggcttgctgggaaatcttccaggcgctgttctgcggggctacgttatacgtgccaacaacagagacgattttgaactacgaacggtttgagcaatatatggcggatcaccacattacggtggctgctttgccgccaacttatgcagtgtatttggagccggggcggatgccgcacctgcgtattctgttcactgcgggttcagcctcatccaccgaactggtatacaagtggaaggatcaggtggcgtactacaatggctatggtccaaccgaaaactcggtggcaacatccatctggccggtatccgaggatgaaagggcaggacaactcatttccatcggacgtcctgtgccgaatcaccgggtatacatggtggatgtccatggacatttggcgccggtcggcgtagcaggtgagctgtgcgtgtccggtccgggtctggcgcgtggttatctggatcgcccagagctgacggcggagaaattcgtagcgaacccgtttgcggcgggtgaagcaggctatgaacgaatgtaccgtacgggggacttggcgagatggatgcctgatggcaacattgaatatttgggccggatcgaccatcaggtgaaaatccggggctaccggatcgaactcggcgaagtcgaggcacaaatgttgaaagtggaaaacgtgcaagaagtcatcgtcctggctcaagcggatgagcagggacaaaaccaactggtggcgtactatgtcgctgaaagagacgtaagcgctggggagctgcgcggcttcctgggtgaggagctgccaaactacatggtgccttcgtatttcatccagctggagcagatgccgctgacaccgaacggcaaaatcgaccgtaaggccctgccggcaccggaaggcagtctgcaaagcggagcggattatgtagagccgcgcacagcgctggagcagacgttggcttcgatttggcagtctgtattaggaacgaagaacatcggtattttggataatttctttgatctgggcggcgattcgatcaaagcaatccaggtatcctcccgcttgctgcaagcgggctacaagctggacatgaaggatttgttccaatatccgtccatttcgctgctgagtggtcatgtacacccagtcagccgtacggccgatcagggcgaggtttcgggcagcgtcaagctgaccccgatccagcagtggttctttggactatcgtcggcagagccgcactattttaaccagtcggtaatgctgcatcgagcagaaggctttgatatagatgcattgcatcgcacggtgacccaggtgacggagcatcatgatgcgctgcgtatggtcttccgtcagaccgaacagggctatgaggcgtggaatcgcggtgtgaacgaaggcgagctgtatcatctggacgttgtagatttgacaggcgtcgaagatacggcagatgtgatgatggcgattgagatgaaagccaatgccatccaaagctccattcatctggatgaaggaccgctggtgaagctgggacttttccgctgcatggatggagatcatttactgattgccattcaccatttggttatagacgggatctcatggcggattgtgtttgaagattttgcgactggatatgagcaggccgttcggggagaagcgattcgcttgccttataaaacggattcgttctctgcttgggcagagcggttgtctcaatatgcgaatagtccagccattgacaacgaacgcgaatactggcagcgtcttgcccacatagaagttgcatcgctacctaaggatcaagacaaagcagcaggacagcctttttgggtcagagatagtgagacggtgaccgtggcttggaacgaacaggaaacccggttgctgcttcaggaatcacatcgtgcgtacaatacggaggtcaatgatctgctgttaaccgcactcggcagcgcattgtacaactggagcggtcaggagcgtgtgctggtcaatctggagggacatggccgggaagctattgttccagatatggatattacacgtaccgtgggctggtttacgagtcagtatccggtgctgctggatgtcgatggaaaggcagagattgggcagcgcatcaagcgggtcaaagaggacctgcgtcatgtgccgcataagggcattggctacggtattttgaagtatatgtcttcggatgatgctacctcttcctggagcctgcagccagagatcagctttaactatttgggacaatttgatcaggatttggaacaaagcgatatcgtgctgtcttcgcatacggacggagagccgatgagtggttataccgtgctggagcagccgctgaatgtgaacggcatgattacagcaggcgtgctgacactggaaattcgctatgacagacaagtatatcatcagcaaaacgtagaaaaatttgcgcagttgctacgggaaagcttgcaggaagtaatcaagcattgtgcctcccaagagcggagcgaactaacgccaagcgatgtcttgttcaaaggcttgtcgttggaacaactggagcaattgacggagcaaacggcttctgtgggcgaactggaaaatgtgtatgctctttctcccatgcagaaagggatgctgttccatagcttgatggagccagactcaggcgcatacttccagcaagcatcgtttgatcaaaaaggcagcttcgatgttgctgttttccgcaagagcctagatctgctgacacagcgtcatgaagcgctgcggacgaatttctatcggtttgagaccggacatggtcaggagccattgcagattgtattccgtcacaaagatagtgacctttcctacaaggatgtacgcggaatgcagaaagcagaacaacaggcgtatatccaggcgttgaagcaggaggatcaggctcggggctttgatctcggtacggatgcactgatgcgcgtacaggtagtgcagaccgatgaagaaacgtatcactgggtctggagcttccatcacattatcatggacggctggtgcttatcgctcgttaccggggaagtgtttggtacgtactttgcgctgctggagcagaaacagccggagcttgctccaatcacaccgtatggtcaatatattgaatggctggagcgtcaggatgaacgtgcggcaaaagagtattggagcaactatttggcaggctttgaacagcagacgttgctgcctggatcggatactgcatcgaaagatcaagtggcagacagcagagataacactgtatccactacagcaagtacaaccagcgaatatgtttgcgaaaaaataacggtggagctggatccaacatggagcgaagccatgtaccggattgccaagcagcagcaggtcacgattaatacactgatgcagagcgtgtggggcctgattttgcagcaatataacaacaatgaggatgttgtattcggcagtgtcgtatctggacgtccgacggatattgcgggtgtagaaaatatgatcggtttgttcattaataccatcccggttcggattcaaagtgaacggaatgccacgtttgtcgacatcatgcggaacacgcaggagaaagcgctggcttcgggggtatatgacagcttcccgctgtatgaaattcaggcgctgaccgagcagaagcagcatctgattaatcacattatggtatttgagaactatccggtcgaggagcaagtcgagcagttgggcgaagttcgtccatccgcgtttgacattacgaatgtagaggttgttgagcagacgaactatgatctggacttgattgtgatgccggatgaaaccttccgtatcatgttcagatacaacgcaaatgtgtacgaccggtctacgatcgagcggatgcagggacatgtactgcatgtcattgagcaaatcgtgaacaatccgcatatccgtgtgaatgagctggaattggtgacaccagaagaacaggcacagatcgttcagatatggggagatacagcggcagcctatccgcaggatcagacgctaagcagtctgtttgagcagcaggtcgcgaacacgccggagcaagtggcagtgctgtgcggagcagaatcgttaacctacgctgagctgaacgagcgagccaatcgtttggcccggacgctacgtgcggaaggggtggaacccgatcagccggtgggcattctgcttcaccgttcgctggacatgatcgtaggtatctacgcgatcctcaaggcaggcggagcttatgtaccgatcgatccggaatatccggccgaccgcatccgctttatgctggaggattcaggcgcgaagctggtgctgacgcaatcgcatctggcggagcaagcatcgctgagtttcgacggccgggtgctggtgctggaccgtgaggacatctatcacgaagatggctcgaatctggagcccttggccggaccgcaccatgtggcctatgtgatctatacctccggttccaccggaaaaccgaagggtgtaatggtggagcaccattccgtgctaaaccggattttgtggatgcatgatcggtacggcttgggtgcggaaaatacgattctgcaaaagaccgccttcaccttcgacgtgtcggtgtgggagctgttctggtggtcgatggtcggctcaaaggtaagcctgctgtcggtcggcggggaaaagaacccggaagacatcgtcgacacgattgcccgcgatggcgtgactacgatgcactttgtaccagcaatgctgcatgcgttcctggagtatgtggaacagcagccacgagaagtgatgcaagcgaagctgggcacactgcgccatgtctttgccagtggtgaagcgttgccgccacagcatgtggcccggttccagcggctcgtgtcgagcctggccggagcgaagctggtcaatctgtatggcccaaccgaagcgacggtggacgtatcgtacttcgattgcgagcctgatggagcctattcggttattcctatcgggaaaccgattcaaaacattcgtctgtacatcgtcaaggaaggcacggagcaattgcagccaattggcgtggcaggggaactgtgcatcggcggtgtcggcgtagcccgcggttacctgaaccgtccggagctgacggccgagaaatttgtgaaagatccgtttgccggcggggaagcagggtatgagcgaatgtaccgcaccggcgatttggcgagatggatgccggacgggaacattgaatatctgggccggatcgaccatcaggtgaaaatccgggggtaccggattgagctgggcgaggtcgaaacgcagttgctccaagtggaatcggtacgcgaagccgtggtcatggctcgtgcagatgaaacgggacaaaaacacatggtggcctactatgttgccgggcaagaaatcagtgccagcgagctgagaagtgcgctggggcaggagctgccaagctacatggtaccatcgtactttgtacagctggagcagatgccactgagtcccaatggcaaaatcgaccgcaaggcactgccagcaccggaaggtagcctgcaaagcggagccgattatgtcccgccgcggacgtgggtggaagtgaagctggcgcaaatttggcaagatgtgctgggcctggcgcaagttggcgtgaaggaaaacttcttcgagattggcggacattcgctgcgggcgacgacactaacctcgaagattcaccaagagctgaacaagcagcttcctctgcgtagtatttttgaagcaccaacgattgaacaactggcggctgtgctggaacagctggatcaagtggcgtatgcgtccattccggtaacggaagagcgcagcttctatccactatcctcggcgcaaaaacgactgtatgtgctgcatcagttcgatccgcaggatgtgaactacaacatgccgtcggtgctgcaagtgagcggtccgctggacgtgaaacgagtggaacatatattccgtcaactgatcgcccgccatgcgaccttgcgtactcgctttgagctgatcgacagtgagccaatgcaatggatcgaggacaccgtaccgttcgaggtggaatatacgaaggtacaggcagagggtgcgactgcggatacagatcaggacacaactacagatacgtacaccagggtcaacatagaggcgcaacagctggtgcggcgctttgtccgtccgtttgatctcaaagctgcgccgctgctacgagtaggcttggtggatctgggccttcaaggagtagaacaggaatcccaacatctgcttatgctcgatatgcaccatatcgtctcagatggggtgtccctggaggtcctgactgatgagtttgtccgtttgtatggcggtgaagagctggcgccattgcggattcagtacaaagattatgccgtatggcagcaaagcgaagcccatcaggaatggatgcagcgtcaggaagcgtactggctgaacaccttccgaggggaactgcctgtgctggatctctctacggactttgcccgcccagcggtacagagtacggcaggggatacgatcgaatttgtactggagcgtgaggttagtgaacgcctgaaagaactggctgcccagaccggctctaccctgtatatggtgatgctggcggcgtacaccacactcttgcacaaatacacaggccaagaggacattgtagtcggtacgccgattgcaggacgaccgcatgcggagctcagtaatctagtcggtgtcttcattaacacgctggcgattcgcaattatccatccggcgatacatcgttccttgagtatctgcaagaggtcaaggagcaggcacttaatgcttatgagcatcaggattatccttttgaagagctggttgaaaaactgaatttaacccgggatacgagccggaatgcgctgttcgacacgatgtttgaattgaaaacatgggagcagcgggagttcgagctggaagggctgaccttgagctcctatccactggacaatcaaacggcaaaattcgatctgagcttggaggcgatagagcagccggaaggcattctgtgcagtctggaatacagcacagtgctgtacaagcgggagaccatgacgcgattggcacagcattttgcggaaatcgttcgagcgattgcctatcatccgcagcagccactggcagttttgaatatggtaaccgatgaggaacaagagcaactcatctacggttttggagaagtgggcgtatcggatgttgctgttgaagcaggagccctgttccatacctatgtggaaaaacaggcacagcttataccagatcaagtggcggtggtatacgaggggcaacagcttacgtaccggaaactgaacgagcgtgcgaaccaattggcgcgcagactaagaaatgaaggtatcggacgcgagtcgattgtcggcattttgagtgagcgctcggtagacatgctggtcggtgtgttggcggtatggaaggctggaggcgcatatgtgccgctggatgcggattatccgtccgaacgcattcgtttcatgctggaggacagcggtgcgacggtgctgttgacccagacgggattgcaggagcgcgcacaagcatggctgaatgaaagccaatggactttgggcgatgaaaaagctaagggtgagctggagacggcggttagcgctgaaacgatggaaagagacaacctgaatgaaggtttgagcttgaaatcagattcgaagtctgacagcgaagcagcatctgaatcggcaacaaagctgcgtctgcaaatcatgctggcattggacgatgagtcactgtacaccggagatacgacagacgttgatcacatcaatgaacctcaagatctggcgtatgtgatctacacctccggaacaaccggacgtccgaagggtgttatgatcgagcatcgctgcttggtgaatacggctgcggcgtatcgccgggattatcgcctgagcgagttcccagtccgactgctgcaactggccagcttctccttcgacgtgttcgtcggggatatggcgcggacgctctataacggcggcacgatggtcatttgtccgaaagacgaccgacttgattttagccgtctgcacggttggattcgtgattatcaaattaccgtgttcgaatcgactccggccctgatcgtaccgtttatgcagcatgtgcatgaacaggggctggacatgagcagcatggaactgctgatcactagctcggatagctgcagcgtgacggattaccgggtgctgcaagaacggtttggcgcagatatccgcatcatgaacagctatggcgtcacggaagcggcgattgactccagcttctatgatgaagaactgtcgaagctgccaagcagcggccatgtgccgattggtcaggcatggctgaatgcccgcttctacatcgtggacagccagctgaatccggtgccgatcggtgtactgggcgaactgtgcatcggcggcatcggggtcgcacgggggtacctaaaccgtgcggacctgacggccgagaagttcgtagcgaacccgtacgtaccgggcgaacgactgtaccgcacaggcgatttggcgcggtggatgccggacggcaatgtagactttatcggccgaatggatgatcaggtcaaaatccggggcttccggattgaactgggcgaggtggaagcgcagctgctgactgtggatggcattgagaaagccatcgtcaccgcctgggaaaacgaaaacggagacaaagatctgtgcgcgtatgtcgtagcctcggaggcgctgaatttgccggagctgcgcagcatactccagcccaaactgccgggctatatgatcccgacgtatgtcgtaccactggatcaattcccgctgacaccaaacggaaaaattgaccgcaaagcgttgccagcaccggaagcgcgcctcgaaggaggcacggagtatgttgcgccgcggacaccgctggaagagcaactggtacgtatttggcaaagcgttctgaatcatcagcgggtaggcatccaggataacttctttgaagtgggaggacattctctgcgcgctacaacactgatggcgaaaatccatcaggagctgaatcacaagctggccttgcgagatattttccaatatccgacgattgagcaattggtacaggtgatgggtgaagatcagacccagcaaatgtatgtatccatacctgtggcggaggagcgcgaatattatcccgtttcctcggcgcaaaaacggatgtacgtgctgagtcatctggaaggcggagaggtgagctacaacatgccaggagctttgattatcgaaggctccttggataaaaagcgactggaacaagccttccgccagctgattgcccgtcacgaaaccttgcgaacccgattcgagatggtggatggcgaggtgattcagcggattgaatctaacgtcccattcagcgtggagtatgtgcaagcaagcgaagaagagacaccgcagtacgcacaggactttgtacgtgcctttgatctcgcacaagccccgttgctgcgggttcagttgatcgaaaacggaccggggcgtcacgttatgctctatgacatgcaccatattatttcggatggcgtgacagaaggaattatcgtgcaggagttctctcaattgtatgaaggcaaggaactgccgccctgcggatacagtacaaggactatgcggtttggcagcatgcagatatgcaaagtgaacgtcttcgtgcgcaagaaagctattggctgaacaccatgtctggtgaaattccggcactggatatgccaacggattttacaagacccgccgtacagcgtctggaaggaactcgatttgagtttgcgatctgcatggaggacagcgagcagttgaagcagctggccgcgcaaaccggatccaccttgtacatggtattgcttgcagcgtatagcacactcttgcataaatacacgggtcaagaggacatcatcgtcggcacgccgattgccggaagaccacatgcggagctgggtagcctagtaggcgtattcctgaacacactggcgattcgcaattatccgtctggtgataaaacgttcttggactacttgcaagaggtcaaagagcatgcgctcagtgcgtatgagcaccaggaatatccgtttgaggagctggttgaaaagctgaatgtaacgcgggatacgagccggaatgcgctgtttgatacgatgtttgagctgaaaacatttgagcagcaggagttcgagctggaagggctgaccttcaagccgtatccgacggacgatcatacgtccaaatttgatctgaccttggatgccgtagagcagtcagaaggcattctgtgcagtctggaatacagcacggcgctgtacaagcctgagaccatcgcgcgctttgcacagcattttactgaactcgtacgagccattacacttcacccacagcagtcactgtccgctttggatatggtaactgtcgaggaaaaagcacaaatcatctatggttttggagatgtaggcgtatcggatgttgctacagttgaagcagaagcacttattccatgtctttgtggaagaacaggcccagcttgtaccagatcatgtggcggtggtgtacgaagagcaacaacttacgtaccgcacactgaatgaacgttcaaatcaatcgctcgcagactgcgaaatgaaggtatcggacgcgaatcgattgtcggcatttggagtgaacgctcggtaaacatgctggtcggcgtactggcggtgtggaaggctggaggcgcatatgtgccgctggatgcagactatccgtccgagcgcattcgtttcatgctggaggatagcggtgcgacggtgctgctcacgcaaaccagtttgcaggagcgtgcccaggcatggctggagaaaagcgatcaggccttggtcgaagggcagactgagggtgagctggaaacagcggctggcgctgaaacgatggaatcaggtgctcttcatggaaacctaaatggaacagcagattcgaagtctgacagcgaagcagcatccgaatcagcaacagggctgcgtctgcataccgtactggcattggacgatgagtcgctgtataccgggatacgacggatgttgaaccgatcaatgaaccgcacgatctggcgtatgtgatttacacctctggcacaaccggacgtccgaagggcgtcatgattgagcatcgcagcttggtaatacggctgcagcgtatcgccgggattaccgtctgaaccagttcccggtacgactgctgcaactagccagcttctccttcgacgtgttcgtcgggatattgcacggacgctctataacgggggcacgatggttatttgtccgaaagacgaccgcattgatccaagccgtctgtacggatggattcgcgattatcagattaccgtgttcgaatcgactccagccctgatcgtaccgtttatgcagcatgtgcatgaacagggccttgacatgagcagtctggaactgctgatcaccagctcggacagctgcagcgtgacggattaccgggtgctgcaagaacgatttggtgcgaatatccgcataataaatagctacggcgtcaccgaagcggcgattgactccagcttctatgacgaagaactatcgaagctgccaagcagcggccatgtgccgattggccaggcatggctgaacgcacgcttctacatcgtggacagccagctgaatccggtgccgatcggcgtactgggcgaactgtgcatcggcggcatcggggtcgcacggggctacctgaaccgtgcggacctgacagccgagaaattcgtagcgaacccgtacgtaccggggaacgtttgtatcgcacaggcgatttggcgcggtggatgccagacggcaatgtggactttatcggccggatggactaccaggtcaaaatccggggataccggattgagctgggcgagattgaaacggcgatccagcgggtgccaggtgtgcgtcaagccgtagtcatcgaccggatggacgagcgtggacacaagtatttgtgtggatacatcacgggagaagccgagctgcggatggaggaagtacagaccgagctggaagccggactgccagcacacatggtgcctgcacgtctgatgcgactggagaccatcccgctgaccagcaacggcaaaatcgaccgcaaggccttgccagagccggaaggcagcatccatacaggagcagcttatgtggccccgcgtacgaaggtggagcaagtactggctgcggtatgggccggagtgctggcgtggatgccgtaggcacgcaggataacttctttgagctgggcggcgattcgatcaaagccctgcaagtctcgtcccgcttgctgcaagcaggttatcgactggagatgaaagacctgttcagtcatccgacggtgtctgccttggcgctgaaagtccaatcggtgacaagattggcggatcagagcgaagtggtgggcgcggtgaaactgacacctgttcagcattggttctttgagcagaacctgacggatgctcatcatcataaccagtccattatgctgcatagccaggacggttttgatgaagtggccctgcgcacagcgatggaccacatcgttagccatcacgatgcactgcggatcgttttccgccttaccgagcatggatatgaagcttggaaccgcgcaattggcgagggtgagctgtatacgctggaacgtatagacttcagccatgagactgaagtgtctgcggcgatggaggccaaagtaaatgaaattcaggcgggcattcatttaagcgaaggaccactggtgaagctggggctgttccattgcccagatggagaccatttattgatggctattcatcacttagtagtggataccgtatcctggcgcattttgttcgaggatcttacgacagcctatgaacaggcattgcacggacaagcggctcgtcttctgcacaaaacggattcgttccgtacctgggccgaggcacagtctcactatgcgaacggtccagaaatggaagcagagctcgcattctggcaagacgtggaacagggaaggtatgagccgcttccaaaagacgaatcaccttctcattccttgaataaagacagcgagcttatgatggtcacatggacagctcaggaaacggagcagttgttaaaacaggcgcaccgtgcctacaacacggatatgaatgatctgctgctgaccgcacttggcacggctattcatcgctgggcggggattgaacgcgtgcttgtcaccctggaaggccatgggcgggagtccattttgcccgagctggatattacgcgtacggtgggctggtttacgacacagttcccggttgtgttggatatgagcgcagggcaagacctttcacagcacatcaaacaggtgaaagaagggctacgccggattccgcaaaagggcattggctacgggatgctgagatacctgtctgcagcatgtgagcaagcgcattttggaaccgaacctgaaatcagctttaactatctcggacaatttgaccaggatatgcaacatcaatccattggcgtgtctccttacgctagcggtgccgagcttagcgcatatgcagccagatcgcacaccctggatctgaacggactgatttccgaaggtcaattgcaattgacgatcagctacagccatcaggaatatcgcaaggaaacgatggaacagctagccgaagcgctcagaaccagcctgcaggaaatcatcgcgcattgcgcgggtcgcaaacagcaggaactgacgccaagtgatgttatgcttaaacctgtaaccttggccgagctggatcagttggtcgaacggacgcgtgacatcggggaactggaaaatgtatatgccttgacaccgatgcaaaaagggatgttgttccatagtctgatggatgcagaatcaggggcttattttgaacaaacgacctttgatctacacggacgtttccaagcggatattttccaagatagcttgaatcagctggcgcagcggcatgagatctttagagctaatttcattagcggctggcaggatgagcccgtacaggtgattttccgccataaagaggttggttttagatatgaggatttgcgtcatttggaagatcaggaacgcgacgcgtatgtgcaggaatttattcgtaaggacaaggtagctggattcgatttatcccgggatgcgttgatgcgcgtggcgattttgcggacaggtgatgaggattattattttgtatggagctctcatcatattttgatggacggctggtgtgtggcgttggtgacggatgaggtgtttgaggcttattttgcagccgtagagcatagagcactgaagctcgcccctgtgactccatacagtcagtatattgcgtggctggaagctcaagatgtagcagcagccgcttcatattggaaggaatatttgctgggctatgatcagcaaacgtcgattccaaccggcaaagtaggcgcgaaagccgagggtgaacaatttgagcatgtgctgtgcgatctgggccaagacttgaccaaacgtatggaaatggtagccaagcagtatcacgtgaccaccaatacgctcctacaaacggcatggggcttactgcttcaaaagtacaacggtagtaacgacgccgtctttggcggtgtcgtatcgggtcgcccggcagatatttcagggatcgaaaacatggtgggcttgttcattaacaccattccagtacgtatccgtagtaaggctgaggacacctttgccgacctgattagagcgaatcagcagcaggcgctggcttctcaagattacgaaacgtatccgctgtatgaaattcaagccttgaccgagcaaaagcaagagctgatccagcacattatcgtgtttgaaaactatccggtggaggagcaggtcgagcagcttggcgaaggtgcggaatcggattttgtcatcagcaatgcagggatgattgagcaaaccaactatgatttcaatctggtcgtcatgccgcaggaagcgatgaaaatccgattcgaatacaatgcgaagttatatgatcgggaagcggtggaacggacgcagggtcatctggtacagctgctggagcaggtggtagcgcagccggacattcaagtgcaggagttggatgtgttaagcgagcaggaacgcgagcaaattctccacggatggggagatacagccgctgagtatccaagcgaacaaacgatccatggcttgttcgaagcacaagccgtgcagacaccggaacagccagcattgtacttcgaaggagagcagttgacctatcgcgagctgaatgaacgtgcgaatcgtctggctcgtaccttacgcagtcaaggcgtgacgaaggatcgtctggtgggtctgatgaccgagcgttcggtagacatgatcgtgggcatctttggaattttgaaagccggaggcgcatatgtcccaatcgatccaacatatccagaggagcgtatccgctacatgctggatgactcgggagcagagctgttgttgacgcaaagccacttggtggacaaagtagctttcgacggtcaggtgctggtgctgaatggggcggagagtgtgcatcacgaggatggttccaatctggagtcgttgtctggtccgaacgatctagcgtatgtgatttatacgtcaggtacgacgggacagccgaaaggggttatgctggagcatcgc

SEQ ID NO: 225 - DNA, 20202 bp, Paenibacillus polymyxa
  source 1..20202: mol_type = genomic DNA
  misc_feature 1..20202: note = strain LU17007
ggtgaagcgttgccgccacagcatgtggccaggttccagcggctcgtatcgagcctgaccggagcgaagctgatcaacctgtacggcccaaccgaagcgacggtggacgtatcgtactttgattgcgagccggatgaggaatatacagttatcccgatcgggaaaccgattcaaaatatccgtctgtatatcgtgaaggaaggcacggagcaattgcagccgattggtgtggcaggggaactgtgcatcggcggtgtcggcgtagccagaggttacctgaaccgtccggagctgacggccgagaaatttgtagagaacccgtttgccggaggcaaagcaggctatgaacggatgtaccgcaccggcgatttggcgagatggatgccggacggcaacattgaatatctgggccggatcgatcatcaggtgaaaatcaggggttatcggattgagctgggcgaggtcgaatcgcagctgctccaggtggaatcggtacgcgaagcggtcgtcgtggcccgtatggacgaaatgggccaaaaccacatggtggcctactatgtcgcgggacaagaagtcgaggccagcaagctaagaagtgagctgggacgggagttgccaggctacatggtgccatcctactttgtacaactggaacagctgccactgacaccgaatggcaaaatcgaccgcaaggccttgcctgcaccagagggcagcctgcaaaccggagtcgattatgccgagccgcgtacggcgcaagaacgcgctttggtagccgtctgggagtcggtactggggttgcagacggtcggtattctggacaatttcttcgatctgggcggtgattcgatcaaggcgatccaaatcgcctcccgtgcgttccaggccggctataagctggacatgaaggatttgttccagtatccaaccgttgaagccctggcaccgcatatgcaagaggtccgtcgtatggcagatcaggaagaagtcagcggggaaacggcgctacttccgatccagcattggttctttgcgcaggagcgcgagcgtccacagcactttaatcaagcggtcatgctctatcgcgcggagggctttgaggagatggcaattcgccaagccatggatcacctcgtgaagcatcatgatgcgctgcgtacggtattccatcagacttccgctggttatacagcttggactcgccatgtagaggaaggcacgttatatacactggaaatggtagattaccgtgaacgggccgcttatgcggaagcgctggaagcgaaggcaacggaaatccaaagcagcatggacctgtccgcaggacctttggtgaaactcggatggttccgcacagcggagggcgaccatctgctgatcgccattcaccacttggtggtggacggggtgtcgtggcggattctgtttgaagatttctcgacaggctacgagcaggcgatccagggcgagtccgtacgattgccctataaaacagattccttccaaaaatgggcacgggagttgtcctcttatgctaaccgtcctgaggctgcatcggatgaagtctattggaagcagctggaacaggtcaaagctgaagctgcaccactgcctaaggattttgcctacgagggctccgtgaatgcagacagcgaagtgctaacggtggagtggactgaagctgaaacccagcaactgctgaagcaggcccatcgcccctataacaccgaggtcaatgatttgctgctgaccgcgctgggactcgcggtgcacaactggacaggtgcaggacatgtactggtgaacctggagggccatggtcgggaagcgatcttgccagaggtggatattacacgtacagtaggctggtttacgagcttgtatccagtgctgctggagaccggcaaagaaatgacactggcagagcggattaaagaaacgaaggaaggcctgcggcgtattccgcataaagggcttacctatggcacttggcgttacctgtcctctgcgttgcctgcagatgaagtgggcacgatcgcagcagaaccggaaatcagctttaactatttggggcaggtcgatcaagatctgcaaaacagtggaattacgttgtcctcctaccgtgcaggggaaacagaggatgcccattcaccgttactgtacacgctggatttgaacgcgatgatctcagaaggcaagctgcgcttgacgatcgcttacagccgtaagcagtatcgtaaagaaacgctggaacaggtggcggggctgctgcaatccgctttgcaggaggtcattacgcattgcgtcgctcaaaagcagcctcagctgacgccaagtgatgtatccttcaaaggtctgacgactggagagctggaacagatcgcggaacaggcagcacgtatcggtgagctggaaaatgtatacgcactgacgccgatgcagaagggcatgctcttttacaatctgatggattcgcaatcgggagcttattttgaacaggcctcctttgatctgcgaggacattttaatatcgctgcctttgcagccagtttggatgtcttggtgcagcggcatacggtactgcgcacgaacttctacagcggctggaaggatgaaccgcttcaggtcgtgtaccggaataagcgcagcgaactgtatgttgaagatttaagggacatggaggacgagcagcaaaacgagtacatcctcgaatttacgcgccaagacaagcaaagaggctttgatctggcgcaggatgttttgatgcgtgtggctgttttgcgcacaggtgaggaatcgtaccgttttgtatggagcttccatcatatcgtgatggacggctggtgcttgtcgctggtgaccaacgaagtgtttgcgagttattttgcgatactggctcataaacaacctgaactggcccctgtaacgccgtacagtcaatatatcgaatggctggaacagcaggatcgtcaggccgcatcaagctactggagcaaggttctggaaggatatgaggagcagtcccgtttgccacaggcaaaaattcagggtaagacggggtatcaggcggagcgtttggattttgatttgggcgcagacctcacagctggtattcagcgcatagccaagcgttatcaggtcaccatcaatacgttgatgcaaaccgtttggggccttttgctgcaaaaatataatggcaccgatgatgtcgtgtttggcagtgtagtatctggacgtccggcagacattccgaatgtggagcatatcattggtctgtttatcaatacgattccggtgcgtatccgcagtcaggtggacagcgtattctccgacgtgatgaagcacatccaggagcaatcgattgcttcccatgtgtatgatacgtatccgttgtatgaaattcaggggctgtcggagcttaagcaggatttgatcaaccatattcttatttttgaaaattatccggtagaggaacaaatcgagcaattaggtagtagtgaggcgtccagcttcacgatcacaggagccgagtctgtcgagcagaccaactatgactttaacgtggtagtgctgccggggaataccattcacatgagctttggctataatgccctagcctttgaacgggaaagtgtggagcaaattcgaggtcatctggtgcagctactggagcaggtgacagcgaatccgaacattcgcgtacatgaactggacatggttacgatgcaggagcgtaagcaaatcgttgaggtgtggggcaatacagcggcagcctatgcaagcgagcaaacgattcacggcttgttcgaggcgcaaaccgcgcagacgccagagcagacagccttgttctttgaaggagagcagctgacttatcgcgagctgaatgaacgcgccaatcgattagcgcgtaccttgcgcagtcaaggcgtgacgaaagatcgtttggtgggtctgatgaccgagcggtcggtggacatgcttgtgggcatcttcgggattttaaaagccggaggcgcctatgttcctatcgatccaacctatccggaggaacgtatccgctatatgctggatgactcgggagcgaagctgctattgacacaaagtcatctggtggacaaagccgttatcgacggtcaagtgctggtattggatggggaacaatcggtgtaccacgaggatggttccaacctggagccgctgtctggtccaaacgatttggcgtatgtgatctacacgtcaggtacaaccgggcagccgaagggcgtgatgctggagcaccacgggctgtgcaatctgaaaacgtattttgatcagacgctcaagattcgtgcgtcggatcatgcgctgctatttgccagctactcgtttgatgcggcttgctgggaaatcttccaggcgctgttctgcggggctacgttatacgtgccaacaacagagacgattttgaactacgaacggtttgagcaatatatggcggatcaccacattacggtggctgctttgccgccaacttatgcagtgtatttggagccggggcggatgccgcacctgcgtattctgttcactgcgggttcagcctcatccaccgaactggtatacaagtggaaggatcaggtggcgtactacaatggctatggtccaaccgaaaactcggtggcaacatccatctggccggtatccgaggatgaaagggcaggacaactcatttccatcggacgtcctgtgccgaatcaccgggtatacatggtggatgtccatggacatttggcgccggtcggcgtagcaggtgagctgtgcgtgtccggtccgggtctggcgcgtggttatctggatcgcccagagctgacggcggagaaattcgtagcgaacccgtttgcggcgggtgaagcaggctatgaacgaatgtaccgtacgggggacttggcgagatggatgcctgatggcaacattgaatatttgggccggatcgaccatcaggtgaaaatccggggctaccggatcgaactcggcgaagtcgaggcacaaatgttgaaagtggaaaacgtgcaagaagtcatcgtcctggctcaagcggatgagcagggacaaaaccaactggtggcgtactatgtcgctgaaagagacgtaagcgctggggagctgcgcggcttcctgggtgaggagctgccaaactacatggtgccttcgtatttcatccagctggagcagatgccgctgacaccgaacggcaaaatcgaccgtaaggccctgccggcaccggaaggcagtctgcaaagcggagcggattatgtagagccgcgcacagcgctggagcagacgttggcttcgatttggcagtctgtattaggaacgaagaacatcggtattttggataatttctttgatctgggcggcgattcgatcaaagcaatccaggtatcctcccgcttgctgcaagcgggctacaagctggacatgaaggatttgttccaatatccgtccatttcgctgctgagtggtcatgtacacccagtcagccgtacggccgatcagggcgaggtttcgggcagcgtcaagctgaccccgatccagcagtggttctttggactatcgtcggcagagccgcactattttaaccagtcggtaatgctgcatcgagcagaaggctttgatatagatgcattgcatcgcacggtgacccaggtgacggagcatcatgatgcgctgcgtatggtcttccgtcagaccgaacagggctatgaggcgtggaatcgcggtgtgaacgaaggcgagctgtatcatctggacgttgtagatttgacaggcgtcgaagatacggcagatgtgatgatggcgattgagatgaaagccaatgccatccaaagctccattcatctggatgaaggaccgctggtgaagctgggacttttccgctgcatggatggagatcatttactgattgccattcaccatttggttatagacgggatctcatggcggattgtgtttgaagattttgcgactggatatgagcaggccgttcggggagaagcgattcgcttgccttataaaacggattcgttctctgcttgggcagagcggttgtctcaatatgcgaatagtccagccattgacaacgaacgcgaatactggcagcgtcttgcccacatagaagttgcatcgctacctaaggatcaagacaaagcagcaggacagcctttttgggtcagagatagtgagacggtgaccgtggcttggaacgaacaggaaacccggttgctgcttcaggaatcacatcgtgcgtacaatacggaggtcaatgatctgctgttaaccgcactcggcagcgcattgtacaactggagcggtcaggagcgtgtgctggtcaatctggagggacatggccgggaagctattgttccagatatggatattacacgtaccgtgggctggtttacgagtcagtatccggtgctgctggatgtcgatggaaaggcagagattgggcagcgcatcaagcgggtcaaagaggacctgcgtcatgtgccgcataagggcattggctacggtattttgaagtatatgtcttcggatgatgctacctcttcctggagcctgcagccagagatcagctttaactatttgggacaatttgatcaggatttggaacaaagcgatatcgtgctgtcttcgcatacggacggagagccgatgagtggttataccgtgctggagcagccgctgaatgtgaacggcatgattacagcaggcgtgctgacactggaaattcgctatgacagacaagtatatcatcagcaaaacgtagaaaaatttgcgcagttgctacgggaaagcttgcaggaagtaatcaagcattgtgcctcccaagagcggagcgaactaacgccaagcgatgtcttgttcaaaggcttgtcgttggaacaactggagcaattgacggagcaaacggcttctgtgggcgaactggaaaatgtgtatgctctttctcccatgcagaaagggatgctgttccatagcttgatggagccagactcaggcgcatacttccagcaagcatcgtttgatcaaaaaggcagcttcgatgttgctgttttccgcaagagcctagatctgctgacacagcgtcatgaagcgctgcggacgaatttctatcggtttgagaccggacatggtcaggagccattgcagattgtattccgtcacaaagatagtgacctttcctacaaggatgtacgcggaatgcagaaagcagaacaacaggcgtatatccaggcgttgaagcaggaggatcaggctcggggctttgatctcggtacggatgcactgatgcgcgtacaggtagtgcagaccgatgaagaaacgtatcactgggtctggagcttccatcacattatcatggacggctggtgcttatcgctcgttaccggggaagtgtttggtacgtactttgcgctgctggagcagaaacagccggagcttgctccaatcacaccgtatggtcaatatattgaatggctggagcgtcaggatgaacgtgcggcaaaagagtattggagcaactatttggcaggctttgaacagcagacgttgctgcctggatcggatactgcatcgaaagatcaagtggcagacagcagagataacactgtatccactacagcaagtacaaccagcgaatatgtttgcgaaaaaataacggtggagctggatccaacatggagcgaagccatgtaccggattgccaagcagcagcaggtcacgattaatacactgatgcagagcgtgtggggcctgattttgcagcaatataacaacaatgaggatgttgtattcggcagtgtcgtatctggacgtccgacggatattgcgggtgtagaaaatatgatcggtttgttcattaataccatcccggttcggattcaaagtgaacggaatgccacgtttgtcgacatcatgcggaacacgcaggagaaagcgctggcttcgggggtatatgacagcttcccgctgtatgaaattcaggcgctgaccgagcagaagcagcatctgattaatcacattatggtatttgagaactatccggtcgaggagcaagtcgagcagttgggcgaagttcgtccatccgcgtttgacattacgaatgtagaggttgttgagcagacgaactatgatctggacttgattgtgatgccggatgaaaccttccgtatcatgttcagatacaacgcaaatgtgtacgaccggtctacgatcgagcggatgcagggacatgtactgcatgtcattgagcaaatcgtgaacaatccgcatatccgtgtgaatgagctggaattggtgacaccagaagaacaggcacagatcgttcagatatggggagatacagcggcagcctatccgcaggatcagacgctaagcagtctgtttgagcagcaggtcgcgaacacgccggagcaagtggcagtgctgtgcggagcagaatcgttaacctacgctgagctgaacgagcgagccaatcgtttggcccggacgctacgtgcggaaggggtggaacccgatcagccggtgggcattctgcttcaccgttcgctggacatgatcgtaggtatctacgcgatcctcaaggcaggcggagcttatgtaccgatcgatccggaatatccggccgaccgcatccgctttatgctggaggattcaggcgcgaagctggtgctgacgcaatcgcatctggcggagcaagcatcgctgagtttcgacggccgggtgctggtgctggaccgtgaggacatctatcacgaagatggctcgaatctggagcccttggccggaccgcaccatgtggcctatgtgatctatacctccggttccaccggaaaaccgaagggtgtaatggtggagcaccattccgtgctaaaccggattttgtggatgcatgatcggtacggcttgggtgcggaaaatacgattctgcaaaagaccgccttcaccttcgacgtgtcggtgtgggagctgttctggtggtcgatggtcggctcaaaggtaagcctgctgtcggtcggcggggaaaagaacccggaagacatcgtcgacacgattgcccgcgatggcgtgactacgatgcactttgtaccagcaatgctgcatgcgttcctggagtatgtggaacagcagccacgagaagtgatgcaagcgaagctgggcacactgcgccatgtctttgccagtggtgaagcgttgccgccacagcatgtggcccggttccagcggctcgtgtcgagcctggccggagcgaagctggtcaatctgtatggcccaaccgaagcgacggtggacgtatcgtacttcgattgcgagcctgatggagcctattcggttattcctatcgggaaaccgattcaaaacattcgtctgtacatcgtcaaggaaggcacggagcaattgcagccaattggcgtggcaggggaactgtgcatcggcggtgtcggcgtagcccgcggttacctgaaccgtccggagctgacggccgagaaatttgtgaaagatccgtttgccggcggggaagcagggtatgagcgaatgtaccgcaccggcgatttggcgagatggatgccggacgggaacattgaatatctgggccggatcgaccatcaggtgaaaatccgggggtaccggattgagctgggcgaggtcgaaacgcagttgctccaagtggaatcggtacgcgaagccgtggtcatggctcgtgcagatgaaacgggacaaaaacacatggtggcctactatgttgccgggcaagaaatcagtgccagcgagctgagaagtgcgctggggcaggagctgccaagctacatggtaccatcgtactttgtacagctggagcagatgccactgagtcccaatggcaaaatcgaccgcaaggcactgccagcaccggaaggtagcctgcaaagcggagccgattatgtcccgccgcggacgtgggtggaagtgaagctggcgcaaatttggcaagatgtgctgggcctggcgcaagttggcgtgaaggaaaacttcttcgagattggcggacattcgctgcgggcgacgacactaacctcgaagattcaccaagagctgaacaagcagcttcctctgcgtagtatttttgaagcaccaacgattgaacaactggcggctgtgctggaacagctggatcaagtggcgtatgcgtccattccggtaacggaagagcgcagcttctatccactatcctcggcgcaaaaacgactgtatgtgctgcatcagttcgatccgcaggatgtgaactacaacatgccgtcggtgctgcaagtgagcggtccgctggacgtgaaacgagtggaacatatattccgtcaactgatcgcccgccatgcgaccttgcgtactcgctttgagctgatcgacagtgagccaatgcaatggatcgaggacaccgtaccgttcgaggtggaatatacgaaggtacaggcagagggtgcgactgcggatacagatcaggacacaactacagatacgtacaccagggtcaacatagaggcgcaacagctggtgcggcgctttgtccgtccgtttgatctcaaagctgcgccgctgctacgagtaggcttggtggatctgggccttcaaggagtagaacaggaatcccaacatctgcttatgctcgatatgcaccatatcgtctcagatggggtgtccctggaggtcctgactgatgagtttgtccgtttgtatggcggtgaagagctggcgccattgcggattcagtacaaagattatgccgtatggcagcaaagcgaagcccatcaggaatggatgcagcgtcaggaagcgtactggctgaacaccttccgaggggaactgcctgtgctggatctctctacggactttgcccgcccagcggtacagagtacggcaggggatacgatcgaatttgtactggagcgtgaggttagtgaacgcctgaaagaactggctgcccagaccggctctaccctgtatatggtgatgctggcggcgtacaccacactcttgcacaaatacacaggccaagaggacattgtagtcggtacgccgattgcaggacgaccgcatgcggagctcagtaatctagtcggtgtcttcattaacacgctggcgattcgcaattatccatccggcgatacatcgttccttgagtatctgcaagaggtcaaggagcaggcacttaatgcttatgagcatcaggattatccttttgaagagctggttgaaaaactgaatttaacccgggatacgagccggaatgcgctgttcgacacgatgtttgaattgaaaacatgggagcagcgggagttcgagctggaagggctgaccttgagctcctatccactggacaatcaaacggcaaaattcgatctgagcttggaggcgatagagcagccggaaggcattctgtgcagtctggaatacagcacagtgctgtacaagcgggagaccatgacgcgattggcacagcattttgcggaaatcgttcgagcgattgcctatcatccgcagcagccactggcagttttgaatatggtaaccgatgaggaacaagagcaactcatctacggttttggagaagtgggcgtatcggatgttgctgttgaagcaggagccctgttccatacctatgtggaaaaacaggcacagcttataccagatcaagtggcggtggtatacgaggggcaacagcttacgtaccggaaactgaacgagcgtgcgaaccaattggcgcgcagactaagaaatgaaggtatcggacgcgagtcgattgtcggcattttgagtgagcgctcggtagacatgctggtcggtgtgttggcggtatggaaggctggaggcgcatatgtgccgctggatgcggattatccgtccgaacgcattcgtttcatgctggaggacagcggtgcgacggtgctgttgacccagacgggattgcaggagcgcgcacaagcatggctgaatgaaagccaatggactttgggcgatgaaaaagctaagggtgagctggagacggcggttagcgctgaaacgatggaaagagacaacctgaatgaaggtttgagcttgaaatcagattcgaagtctgacagcgaagcagcatctgaatcggcaacaaagctgcgtctgcaaatcatgctggcattggacgatgagtcactgtacaccggagatacgacagacgttgatcacatcaatgaacctcaagatctggcgtatgtgatctacacctccggaacaaccggacgtccgaagggtgttatgatcgagcatcgctgcttggtgaatacggctgcggcgtatcgccgggattatcgcctgagcgagttcccagtccgactgctgcaactggccagcttctccttcgacgtgttcgtcggggatatggcgcggacgctctataacggcggcacgatggtcatttgtccgaaagacgaccgacttgattttagccgtctgcacggttggattcgtgattatcaaattaccgtgttcgaatcgactccggccctgatcgtaccgtttatgcagcatgtgcatgaacaggggctggacatgagcagcatggaactgctgatcactagctcggatagctgcagcgtgacggattaccgggtgctgcaagaacggtttggcgcagatatccgcatcatgaacagctatggcgtcacggaagcggcgattgactccagcttctatgatgaagaactgtcgaagctgccaagcagcggccatgtgccgattggtcaggcatggctgaatgcccgcttctacatcgtggacagccagctgaatccggtgccgatcggtgtactgggcgaactgtgcatcggcggcatcggggtcgcacgggggtacctaaaccgtgcggacctgacggccgagaagttcgtagcgaacccgtacgtaccgggcgaacgactgtaccgcacaggcgatttggcgcggtggatgccggacggcaatgtagactttatcggccgaatggatgatcaggtcaaaatccggggcttccggattgaactgggcgaggtggaagcgcagctgctgactgtggatggcattgagaaagccatcgtcaccgcctgggaaaacgaaaacggagacaaagatctgtgcgcgtatgtcgtagcctcggaggcgctgaatttgccggagctgcgcagcatactccagcccaaactgccgggctatatgatcccgacgtatgtcgtaccactggatcaattcccgctgacaccaaacggaaaaattgaccgcaaagcgttgccagcaccggaagcgcgcctcgaaggaggcacggagtatgttgcgccgcggacaccgctggaagagcaactggtacgtatttggcaaagcgttctgaatcatcagcgggtaggcatccaggataacttctttgaagtgggaggacattctctgcgcgctacaacactgatggcgaaaatccatcaggagctgaatcacaagctggccttgcgagatattttccaatatccgacgattgagcaattggtacaggtgatgggtgaagatcagacccagcaaatgtatgtatccatacctgtggcggaggagcgcgaatattatcccgtttcctcggcgcaaaaacggatgtacgtgctgagtcatctggaaggcggagaggtgagctacaacatgccaggagctttgattatcgaaggctccttggataaaaagcgactggaacaagccttccgccagctgattgcccgtcacgaaaccttgcgaacccgattcgagatggtggatggcgaggtgattcagcggattgaatctaacgtcccattcagcgtggagtatgtgcaagcaagcgaagaagagacaccgcagtacgcacaggactttgtacgtgcctttgatctcgcacaagccccgttgctgcgggttcagttgatcgaaaacggaccggggcgtcacgttatgctctatgacatgcaccatattatttcggatggcgtgacagaaggaattatcgtgcaggagttctctcaattgtatgaaggcaaggaactgccgcccctgcggatacagtacaaggactatgcggtttggcagcatgcagatatgcaaagtgaacgtcttcgtgcgcaagaaagctattggctgaacaccatgtctggtgaaattccggcactggatatgccaacggattttacaagacccgccgtacagcgtctggaaggaactcgatttgagtttgcgatctgcatggaggacagcgagcagttgaagcagctggccgcgcaaaccggatccaccttgtacatggtattgcttgcagcgtatagcacactcttgcataaatacacgggtcaagaggacatcatcgtcggcacgccgattgccggaagaccacatgcggagctgggtagcctagtaggcgtattcctgaacacactggcgattcgcaattatccgtctggtgataaaacgttcttggactacttgcaagaggtcaaagagcatgcgctcagtgcgtatgagcaccaggaatatccgtttgaggagctggttgaaaagctgaatgtaacgcgggatacgagccggaatgcgctgtttgatacgatgtttgagctgaaaacatttgagcagcaggagttcgagctggaagggctgaccttcaagccgtatccgacggacgatcatacgtccaaatttgatctgaccttggatgccgtagagcagtcagaaggcattctgtgcagtctggaatacagcacggcgctgtacaagcctgagaccatcgcgcgctttgcacagcattttactgaactcgtacgagccattacacttcacccacagcagtcactgtccgctttggatatggtaactgtcgaggaaaaagcacaaatcatctatggttttggagatgtaggcgtatcggatgttgctacagttgaagcagaagccttattccatgtctttgtggaagaacaggcccagcttgtaccagatcatgtggcggtggtgtacgaagagcaacaacttacgtaccgcacactgaatgaacgttcgaaccaactcgctcgcagactgcgaaatgaaggtatcggacgcgaatcgattgtcggcatttggagtgaacgctcggtaaacatgctggtcggcgtactggcggtgtggaaggctggaggcgcatatgtgccgctggatgcagactatccgtccgagcgcattcgtttcatgctggaggatagcggtgcgacggtgctgctcacgcaaaccagtttgcaggagcgtgcccaggcatggctggagaaaagcgatcaggccttggtcgaagggcagactgagggtgagctggaaacagcggctggcgctgaaacgatggaatcaggtgctcttcatggaaacctaaatggaacagcagattcgaagtctgacagcgaagcagcatccgaatcggcaacagggctgcgtctgcataccgtactggcattggacgatgagtcactgtacaccggtgatacgacagacgttgaacctatcaatgaaccgcacgatctggcgtatgtgatttacacctctggcacaaccggacgtccgaagggcgtcatgattgagcatcgcagcctggtaaatacggctgcggcgtatcgccgggattaccgtctgaaccagttcccggtacgactgctgcaactggccagcttctccttcgacgtgttcgtcggtgatattgcacggacgctctataacgggggcacgatggtcatctgtccaaaagatgaccggattgatccaagccgtctgtacggatggattcgcgattaccagattaccgtgttcgaatcgaccccggccctgatcgtaccgtttatgcagcatgtgcatgaacaggggctggacatgagcagtctggaactgctgatcaccagctcggatagctgcagcgtgacggattaccgggtgctgcaagaacggtttggtgcgaatatccgcatcatgaacagctacggcgtcaccgaagcggcaattgactccagcttctacgacgaagaactgtcgaagctgccaagcagtggccatgtgccgattggtcaggcgtggctgaacgcacgcttctacattgtggacagtcagctgaatccggtgccgatcggcgtactgggcgaactgtgcatcggcggcatcggggtcgcacgagggtacctgaaccgtgcggatctgacagccgagaagtttgtagcgaacccgtacgtaccaggtgaacgactgtaccgcacaggtgacttggcgcggtggatgccggacggcaatgtagactttatcggccggatggactatcaagtcaaaatccggggctaccggatcgagctgggcgagattgaaacggcgatccagcgggtgccgggtgtgcgtcaagccgtggtcatcgatcggacagacgagcgtggacacaagtatttgtgtggatacattacgggagaaacagaggagctgcggatcgaggaaatacaggcagccctggaagcaggactccccgcgcacatggtgcctgcacgcttgatgcgtctggaggccattccgctgaccagcaacggcaaaatcgaccgcaaggccttgccagagccggaaggcagcatccatacgggagcagcctatgtggccccgcgtaccaaggtggagcaagtactggctgcggtatggaccggagtgctgagcgtggaagccgtaggcacgcaggataacttcttcgagctgggcggcgattcgatcaaggctctgcaagtctcgtctcgcttgctgcaagcaggttatcgactggagatgaaagacctgttcagtcatccgacggtgtctgccttggcgctgaaagtccaatcggttacccgattggcggatcaaagcgaagtggtgggcactgtgaagctgacacctgttcagcattggttctttgagcaaaacctgacggatgctcatcatcataaccaatccattatgctgcatagcaaggacggttttaatgtagcggcgctgcgtacagcgatggatcaaatggttagtcatcatgatgcactgcggatcgttttccgccttaccgagcacgggtatgaagcttggaaccgcgcggtgggtgagggcgagctgtatacgctggaacgtatagacttcagccatgagactgaagtgtctgcagcgatcgaggccaaagtaaatgaaattcaggcgggcattcatttaagcgaaggaccgctggtgaagctggggctattccattgccccgatggagatcatttgctgatggctattcatcacttagtagtggataccgtatcctggcgcattttgttcgaggatcttacgacagcctatgaacaggcattgcacgggcaagcggctcgtcttccgcacaaaacggattcgttccgtaactgggctgaggcacagtctcactatgcgaacggtccagcaatggaagcagagttctcattctggaaagaagtggaacagggaaggtatgagccgcttccaaaagaccagccacagtcatcttccttgaataaagacagcgagcttatgacggtcacatggaccactcaggaaacggagcagttgttaaaacaagcgcatcgtgcctacaacacagatatgaatgatctgctgctgaccgcactcggcctggctattcatcgctgggcggggattgaacgcgtactcgtcaacttggaaggccatggacgggaatccattttgccagagctggatattacgcgcacggtgggctggtttacgagtcaattcccggttgtcctggatatgagcgcagggcaagatctttcacaacgtatcaaacaggtgaaagaagggctgcaccggattccgcaaaagggtattggctacgggatgctgagatacctatctgcagcatgtgagcaagcgcattttggaaccgaacctgaaatcagctttaactatctcggacaatttgaccaggatatgcaacatcaatccattggcgtgtctccttacgctagtggtgccgagcttagcgcacatgcagccagatcgcacacgctggatctgaacggactgatttccgaaggtcaattgcaattgacgatcagctacagccatcaggaatatcgcaaggaaacgatggaacagctagccgaagcgctcagaaccagcctgcaggaaatcatcgcgcattgcgcgggtcgcaaacagcaggaactgacgccaagtgatgtgatgcttaaacctgtaaccttggccgagctagatcagttggtcgaacggacgcgtgacatcggggaactggaaaatgtatatgcattgacaccgatgcaaaaagggatgttgttccatagtctaatggatgcagaatcaggggcttattttgaacaaacgacctttgatctacacggacgcttccagcccgatattttccaagatagcttgaatcaactggcgcagcggcatgagatctttagagccaatttcatcagcgggtggcaggatgagcccgtacaggtgattttccgccataaagaggttggtttcagatgtgaagatttgcgtcatttggatgatcaggaacgtgacgcgtatgtgcaggaatttattcgccaggacaaggcagctggattcgatttgtcccgggatgcgttgatgcgcgtggcgattttgcggacaggtgatgaggattattattttgtatggagttctcatcacatcctaatggacggctggtgtgtggcgttggtaacggatgaggtgtttgaggtttactttgcagccgtagagcatagagcaccgaagctcccccctgtgactccatacagtcagtatattgcgtggctggaagcacaggatgtagaagcagcagcctcgtactggaaggaatatttgctgggctatgatcaacaaacttcgattccgaccggaaaagtaggcgcgaaagcggacggcgaacaatttgagcatgtactgtgcgacctaggtaaggatttaacaggacgtatggaaatggtagccaagcagtatcacgtgaccaccaatacgctcctacaaacggcctggggcttactgcttcaaaagtacaacggtagtaacgacgctgtctttggcggtgtagtatcgggtcgcccggcagatatttcagggatcgaaaacatggtgggcttgttcattaacaccattccagtacgtatccgtagtaaggctgaggacacctttgccgacctgattagagcgaatcagcagcaggcgctggcttctcaagattatgaaacgtatccgctgtatgaaattcaagccttgaccgagcaaaagcaagagctgatccagcacattatcgtgtttgaaaactatccggtggaggagcaggtcgagcagcttggcgaaggtgcggaatcggattttgtcatcagcaatgcagggatgattgaacaaacgaactatgatttcaatctggtcgtcatgccgcaggaagcgatgaaaatccgattcgaatacaatgcgaagttatatgatcgggaagcggtggaacggacgcagggtcatctggtacagctgctggagcaggtggtagcgcagccggacattcaagtgcaggagctggatgtgttaagcgagcaggaacgcgagcaaattctccgtgtatggggagatacagctgctgagtatccaagcgatcaaacgatccatggcttgttcgaagcacaagcagtgcagacaccggaacagccagcgctgtacttcgaaggagagcagttgacctatcgcgagctgaatgaacgtgcgaatcgtctggctcgtaccttacgcagtcaaggcgtgacgaaggatcggctggtgggtctgatgaccgagcgttcggtagacttgattgtgggtatgttaggcattttgaaagctgggggcgcatatgttccaatcgatccaacgtatccagaggagcgtatccgctatatgctggatgactcgggagcagagctgttgttgacgcaaagccacttggtggacaaagtagctttcgacggtcaggtgctggtgctgaatggggcagagagtgtgcatcacgaggatggctccaatctggagccgttgtccggtccgaacgatctaacgtatgtgatttatacgtcgggtacgacggggcagccgaagggtgtcatggtagagcatcgc

SEQ ID NO: 226 - DNA, 28195 bp, Paenibacillus polymyxa
  source 1..28195: mol_type = genomic DNA
  misc_feature 1..28195: note = strain Sb3-1
atgactcagcacgatgttcaattgtttgcattaagccagccacagcaacgtatttggtacacggagcttgtgtatcccaatcgcaacacgtctacgattattactactgttaaaatcaagggaacggttcgcatagatgcattgcagcaggcaatgaaccgggttattgcacgaaatgattcttttcgtatcaaaatcacggttcgggacggcattccctatcaatatgttgagccgtttgctactcaaagcatagaaacccttcaggtaacccaggaggaagctgagctatgggtgagccatcataacgcacagccgttccccttactggattcgcagctgtatcggtttgttattttgcagctgggggcagaagatacctggtttagtttcaagatgcatcatattatttctgacggcgttaccatggagcaggccattaatgaaattacgggaaattatatgaatattgtgcatggtacaggttcagatgcgccggtcccagcgaactcatatctcgattttattcagacagagcaaagctatgagcaatcagaacgctatcaaaaggataagatgtactggacggagaaatttgccaatttgccggaggttacaggtttaaaatcgtacaatccgctcacagtaagcacggctgcacgccgggagacctatacactggagcacgaattatatcgtggtgtcacggctttttgcgaggcgcataacatcagtatttttacattttttctggctgctctgtatatttatttacataaaacgacaggtgaacaagatttaacggttggtacattgtatgctaaccgtacgttgaagaaggaaaaaaatacaatgggcatgttcgtcagcactgtggctacacgtttgcaagttgagccggaatccgagctgcttactttcctacagggtgttggcaaggagcagtcgtccattttgcggcatcagcgttatccgtataacaaaatcatacaggatttgcgtgaacaacaaagcggcacggatattggccgcctgtttggcgttaccattcagtaccgtacgctgagcttttctcgttttgatgaagctgttcagcaggtgcataccgatttctgcggagatacggtgagtgactttgatattgccatgattgacatgctggatgacgataaacttgtattgcaactggattatcggaccgagctgttcagcgagcaggaaatcgcccgaatgattcaccaatttttgagtgtggtagagcatatggtgaaagggccacagcagcggattcaggagttgtcactgatgagtgacaaagagcgggcacaaattatgaatgtatttaatgcgaccacagttccctttccagacgatgtggggattcatgagctattcaagaaacaggcagaatgtacaccagatcagacagcggttatgtttggaagtcagagtctgacttatcgggaactgaatgaacggtcgaattcattggcacgaatgcttcaagcacagggagtaggacctgacaagctggtcggcctgatgatgcatcgctcagtggaaatgatcgtaggcctgctggctgttctaaaagcaggcggtgcttatgtgccgattgatcccgaatttccgtcatctcgtattgaatacatgctggaagacagcaaggctgcagtgcttctgaccagtcgtgatttggcagaagagcaccattgtcaggccaataccatgtttcttgaggatgcagaattgtatcagggagacagctgcaacctggaggtgatttctcacccagagcatttggcttacgtcatctatacctctggatcgactggtaatccgaaaggagttatgctccagcatcgttcggtactcaactttattaccgggatgcgtgaaatcattgactttgaagctggtaaaaccattttgtcactcacgaccatttcattcgatattttcgtcttggaaactatcttaccgctattggctggaatgacggttgtgcttggcgatcaccagcatcaattggatcctcaggcgcttggtgagttgattacccatcattctattgagatgttgcaaatgacaccatcccggctgcagatgctgctggatcatgaagctggttcccgcgcgctgcggggcgtaaaggaaatcatggtgggaggtgaagcccttccttccaagctgctcgcagcactgcaagaaataaatggcccccgtatttataacatgtatggacctacagaaacgacggtttggtcgaccgtacaggaactgactcatgctcaagaaattaatataggacgtcccatcgcgaatacccaaatatatatcatcaatgcgaatggggaattgcagccagtcggtgtgccgggcgagttatgtatagcaggggaaggcttggcccgtgggtattggaatctggaagatctgacggcagagaaatttgtaaataatccgtttgccggagataaagcaggttatgaacggatgtaccgtacaggcgatttggcgagatggacactggacggcaacattgaatatttgggacggatggatcaccaggtgaaaatccggggctaccggatcgaactgggcgagatcgaatcgcagctattgcaggtggagtcggtacgagaagcggccgtcgtggctcgtgtggacgaaacaacgggccaaaaacaaatggtggcatactatgtggccagtcaagcaatggaagccagtaaactgagaagtgagctggggcgggagctaccaagctatatggtgccgtcgtatttcattcagttggagcagatgccgttgacaccgaacggtaaaatcgaccgcaagtccctgccagcaccggaaggcagtcagcaaagcggagcggattatgaagcgccccatactgcgcgggaacaggcactcgcaacgatctggcagtccgtcctgggcgtgccaactgtaggtattttggacaatttctttgatctgggcggcgattccatcaaggcgattcaaatcgtatcccgtgcgttccaggcaggctacaagctggatatgaaggatctgcttcggtgtccaaccatcgcagcattggcaccacttatgacaagtcgtatggcagatcagggagaagtgagcggggaaacggcattgcttccgatccatcattggttctttgaacaggagcaagtggacgcgcatcactttaatcaggcggttatgctgcaccgggagcagggctttgacgaagctgctttgcaacaagcgctaatccagttgacggagcaccacgatgcactgcggatggtgttcaggaagaccgagcaaggctaccaagcgtggaatcgcggaatacaggaaggcgagctgtatcatctggacgtgctggactttagggatttgacggatgaagtcaccctgagcacgaagattgaaacgaaagcaactgaaattcaaaacaacataaacttgtctgaaggaccgctggtaaagctcgctctgttccgttgtactgatggagaccatttgttggtgacaatccaccatttggtggtcgacggcgtgtcatggcgtattttgctggaggatctggcatccggctatgagcaggctttacgggacgagtctgtccgcttgccgaataagacggattccttccgcctgtgggcagatcaactggcagcttatgcgaacagcaccgcgttaaagaaggaacgtgcgtattgggagcaggtggagcgagctggtgctgctcaagaggcattgcctaaggattacactcgtaaatctcaggccaagccacagcttcgtgatgatcgaacactgaccgtagcgtggacggtcgaagaaacggaacaattcttgaaacaagctcatcgggcctacaatacagaagcaaacgacctgctgctgacagctttgggcatcgccattcaggagtgggcaggcatccgtcaggtgcttgtaaacttggagggtcacggacgggaagccattttgccggatatggatattacgcgcacggtcggttggtttaccagccaattcccagttgtactggatatgggcgaggaccggaatgtgggacagcgtgttaagaacgtcaaggaagggctgcgccgtttgccgcataaagggattggatacgggattttgagatatcttgctgacggagaagggaaagcaaattttgttgccgagccggaaatcagctttaactatctcggacaattcgatcaggatttgaaaaataatgcattccgcatgtctccttattccatcggagcttccatgagtgacacgttgaccaagcgatatgcgctggatattaacggcatgatcacggacggtaccctggagctgacgatcagctacagcaacaaaatgttcatgaaaaaatcaatcaaaaagctggctgatctgctgcaggagagcttgcgtaaggtgttggatcactgtgtggccaaagagttgccggagctgaccccaagcgacttgtccttccgaggactgacggctgtagagctggatcatattgtagagcagacggctgctgcgggagaactggaaaacatttattcgttaacacctatgcaaaaaggcattctgttccacggcttcatggagccgcaatccggggcatattttgagcaggcgacatttgatctacaaggcagctttcaagtggaggcttttgccgaaagcctcaatcaactggtggatcgccatcaaatattcagaacgaatttttatagcggctggaatgaacagcctttacaggtggtgtatcgacacaaacatgcggggttccgttttgaagatatacgcttgatgggacaagaagagcaggacgcgtacattgctgattttgctgagcgcgacaaaggcgaaggctttcatttcagctcaggcgagctgatgcgggtgtctattttacgtacaggtgaggagtcttaccgttttgtatggagcttccatcatattttgatggacggctggtgcttgttcctggttgtaggggaagcatttaatacgtactttgccatcctcgaagaccgcaagccggagcttgcccctgtaacaccatacagcgaatacattgaatggctggatcggcaggacaagacggaggctgaacggttctggcgcgattattttgcgggctttgagcagcagacggtattgccgcaggtcaaacagctggacggtcacgctaaagcatatgaagcggacaagctttcgtttacactgggccgtgaagtgacggagcggatgaacaagctggttaagcagaagcaagtgacggtcaacacacttttgcaagcagcgtggggcgttgtgctacagcggtataacaacagccgggatgtggtatttggcagtgtcgtatctggtagatcagcagatattccgggcatagacaaaatgattgggttgttcattaatacggttcctgtacggattcacagtgagaaagatatgacatttgctgggctgatgaagcagatccaggagcaggcactggcttcccgtgcctacgaaacctatccgttgtatgacattcaggccctgaccgagcagaaacaggacttggtaaaccatattatcgtgtttgaaaactacccggtagaacagcgcatggagcagatgggtagccgtggcgcgaatggctttacgattgccaatgcttccatgtcagagcaaacaaactatgatttcaacattaccgttgtgccaggcgacgaaatccatgtgcatttggagtacaacgcgaaggtgttggaacgtgcagctgtagagcaaatccgtgagcatttgctgcatatgattgaagaagcgattcacagaccagatgcacgggtagatgagcttcaattggtgactgctgcggaaaaagcaaaaatcatcgatggttttggatcagtaggcgtagctgcgtggactgatgaaaaagaatctaatttgttgttccacgcctatgtggaacaacaggcacagcttgtgccggatcacgtggccgttgtatacgaggagcggcagtttacgtaccgcgagctgaacgagcgtggaaaccagcttgctcgtagattgcggaatgagggcattggacgcgagtccattgtcggtattttgagtgaacgctcggtggacatgctggtcggcgtactggcggtgtggaaagccggaggcgcatatgtaccgctggatgcggattatccgtccgatcggattcgctttatgctggaggacagtggtgcgacggtgctgctaacgcaaaccggtttgcaagagcgtgcacagggttggctggaggcaagtcggcaggccttggtcggagggcagactgagggtgaattggaaacagcggctggcgctgaaacgatggaaagagacagcctgagtgaaggcgtaagcttgaaattagattcgaagtctgacagcgaagaagcatccaaaccagcaaccgggctgcgtctgcataccgtattggcattggacgatgagtcgctgtacaccggggatgccacggatgttgaacctatcaatgaaccacacgatttggcatatgtgatatacacgtctgggacaaccggacgtccgaaaggcgtcatgatcgaacatcgcagcttggtgaatacggctgcggcgtatcgccgggattaccgtctgaaccagttcccagtacgactgctgcaactggccagcttctctttcgacgtgttcgtcggggatatggcacggacgctctataacgggggcacgatggtcatttgtccgaaagatgaccgcattgatccaagccgtctgtacggctggattcgtgattaccagattaccgtgttcgaatcgacaccagctttgatcgtaccgtttatgcagcatgtgcatgaacaggggctggacatgagcagcatggaactgctgatcaccagctcggatagctgcagcgtgacggactaccgggtgctgcaagaacggtttggcgcagatatccgcatcatgaacagctacggcgtcaccgaagcggcgattgactccagcttctatgacgaagagctatcgaagctgccaagcagcggccatgtgccgattggtcaagcgtggctgaacgcacgcttctacatcgtggacagccagctgaatccggtgccgatcggtgtactgggtgagctgtgcattggcggtgctggcgtggcacgggggtacctgaaccgtgcggacctgaccgccgagaaattcgtagcgaacccttacgtaccgggggaacgtttgtatcgcacaggcgatttggcgcggtggatgccggacggtaatgtggactttatcggccggatggactaccaggtcaaaatccggggctaccggatcgagctaggcgagattgaaacggcgatccagcgagtgccaggtgtgcgtcaagccgtagtcatcgaccggacggacgagcgtggaaacaaatatttgtgcggatacatcacgggagaaaccgaactgcggatcgaggaagtacagaccgagctggaagccggactgccagcacacatggtgcctgcacgtctgatgcgactggagaccatcccgctgaccagcaacggcaaaatcgaccgcaaggccttgccggagccggaaggcagcatctatacgggagcagcctatgtagccccgcgtaccacagtggagcaagtactggctgcggtatgggctggagtactgggcgtggaagccgtaggcacgcaggataacttctttgagctgggtggcgattcgatcaaagccttgcaagtctcgtcccgattgctgcaagcaggttatcgattgaacatgaaggatctcttcagtaatccgacggtagcggcactcagtcctttgcttcgtacagatggcaagatggccagtcaggaagaggcagtaggcccggtggaactgacacctattcagcgatggttcttcgagcagcagccggctgacctgcaccacagcaaccaggcgatgatgctgtatcgagctgggcgctttgacgtcgacgcgctgcgccgtacgatggaccgtatggtccagcatcatgacgcattgcgcacggtattccgtgagacggagcagggctatgtcgcttggaaccgcagtgtagaggaaggcgagctatacacgctggacattgtagatttcagcgcagtggaagacgaatccaccgctgttgaagccaaggcgagtgaaattcaagccagcattcatttgagtgagggtccacttgtgaagcttggtctgttccactgcgctgagggcgaccatttgctaatcgtcattcatcatttggttgtggacggtgtatcgtggcgtattttactggaggatttggcatccggttatgagcaggctgttgcaggtcaaaccggcacagcgatccgactgccgcataaaacagattcattccaggtatgggccaaacagctgtcagcctatgccagcagtgcgacgatggagcgggagcttgcttactggcagcatatcgaacaagcagaagctaaccttgtgaagcctttgccgaaggattttgcaaatgacaatgctctgcttggagacagtgaggttgtgacggtccgctggacgaagcaggaaaccgagcagctgctcaaacaagctcatcgcacgtacaacacggaaatgaatgacctgttgctggctgcgctcggaaaagcagtctatgactggtctggttccgaacgggtgctggtcaatctggagggccatggacgggaagccattgtaccggatgtggatattacgcgcacggtcggctggtttacgagccagttcccggttgtactggatggaagtttgggacaagggggacataccgctcgtctgatcaaaaggatcaaggaagggctgcgtcatatcccgcaaaaaggcatcggctacggtattttacgatacctgtcagatatgaatatgctggagaaagcaggagtgcggttacaggctcagcctgagatcagttttaactatttgggccaattcgatcaggattataaaagcaatgatctggagccttccacctattctatcggtgtgcctgtcagcacgaacgcgactatggattttgcgctggatatcaatggagtaatcgaagatggcgagttgatgttcacgattcgctacggcacaacacaattccgtcatgaaacgattgaacggcttggagagctgctggcatccagcttgcgtgaggtgattcatcactgtgttgcccaagaaagaacgatgctaaccccaagtgatgtcctgttaaaccatgtaacgctggatgagctggagcaattggtggaagatacgcgagatctgggcgagctggaaaatgtgtatgccttgacgccgatgcaaaaggggatgctcttttacagcttgatggatgagaattcggcggcttattttgagcaggccacctttgagttgaacgggcgttttgatgtggttactttcggtaaaagttttgatttgctcgtacagcgtcatgaggcattgcggacgaactttatcagttcatggaaggatgagcctgtacaggtcgttttccgcaaacgtagcggacaattatactatgaagacctgcgcggactggagaaagaggaacgagcagctcgtgttgaagcttttgtcatcgaagataaagcaaaaggattccatctggcagagggcgcactcattcgtatctccatcctgcaaaccggggatgaaacgtatcactttatctggagcttccatcacattttgatggatggctggtgcttgtcctttatgacacaggaggtattcggtagctatctggcactgcgtgcgggaggggagccagtactggagccagtcacgccgttcagtcgatttattgaatggctggaacgtcaggaccgtgaggcagccttgcaatactggagtgggtatttggcggactatgagcagcaaattacgcttcctcagcaaaaaacacagcctaaatcgatgcacgtcggggaatatatcgctgaagatctggattgcgaattccagccagagctggttgcccagattgaacgggtggcgaagcaaaatcaggtcacgatcaatacgctgattcagacggtatggggcgtcttgttgcaaaaatataacaatagttcggatgtcgtgttcggcagcgttgtgtctggtcgcccaggggatattccaggtgtagagcacatgatcgggctatttattaatacgattccagtgcgtgtgcagtctgaacaaggcgaaacctttgtcgagctgatgaaacgaacccagcagcaggcgctggcttccaatgcctacgatgcgttcccgctgtatgaaattcaggcgctgaccgagcagaaacaggatttaatcaatcatattatgatttttgaaaattatccggtggagcaacaggtagagcagttgggcagtgaaggactggagcccttcacaatttcgaatgtggtgtctacagaggaaaccaattacgatctgaacgtcgtcgttatgccgggagaaggcattaaaattcgttttatgtataacacgctcagctttgatcaagcaggcattgagcgtctatatgggcatttcgcacgtctgctggagcaaatttcgctcaacccgcatgttcgggttgaagagctggaactactcacagcagcggaaaaacaacagattacagcagcatttaatgacaccgcttgtgcattcccatgcaaacagacgatccatcagctgttcgaggagcaggtagaatatacgccagaccaggtggcattggtgtttggacatcagagtctgacttatcgggaactgaatgaacgggccaactcattggcacgcatacttcaagcacagggagtaggacctgacaaactggtcggcctgatggtgcatcgctcagtggaaatgatcgtaggtctgctggccgttctaaaagcaggtggtgcttatgtgccaattgatcccgaatttccgtcctctcgtattgcatacatgctggaagatagcgaggccacagtgcttctgaccagtcgtgatctgttggaagagcatcattaccacgccaatgcaatatttcttgaagataaagaattgtatcagggagagaacggcaacctggagacaattgcccagccagagcatttggcatacgtcatctatacgtctggttcgactggaaatccgaaaggagttatgctccagcatcgctcggtcctcaattttattacagggatgcgcgaagtcattgactttgaagccagccaaaccattttgtcactgacgaccatttcattcgatatttttgtcttggaaaccatcttgcctctgctgggtggaatgacggtcgtgcttggcgacagccagcatcaggtgaatcctcaggcactaggtgaattgattgctcatcatcatattgagatgttgcaaatgacaccatcccgggtgcaaatgctgctgggtcatgaagcaggctcccgcgcgctgcaaggcgtgaaggcaattatggtcgggggcgaagcccttccgtccaagctgctcgcagcactgcaagaaataaacggtccccgtatttacaatatgtacggacctacagaaacgacagtttggtcgactgtgcaggaactgacccatgctcaacaaattaacattggacgccctatcgcgaatacccaaatatttatcatgaatgccaatggggagttgcagccagtcggtgtgccgggtgagttatgtattgccggggaaggattggcccgtgggtattggaaacgtgaagaactgacggccgagaaatttgtaaataatccgattgctggtgacaaggcagaccatgagcggatgtatcgtacaggcgatttggcaagatggatgccggatggcaagattgaatatttgggtcggatggaccatcaagtgaaaatcagaggctaccggatcgaactgggcgagatcgaatcgcagctgctgcagatggagtccgtacaagaagcggtcatcatggcccgcacggacgaaacgggtcaaacccagctagtggcgtactacgtggcgagtcaagagcttggagctaatgagctgaggcaggagctgggacaagagctgccaagctatatgatgccgtcgtatttcatctggttggagcagatgccgctgacaccgaacggtaaaatcgaccgtaaggcactgcctgcaccggaaggcagtctgcacagcggtgcggattatgcagtgccacgcactgtaacggaacgagcactcgtagcgatctggcagtccgtcctgggcgtgccaactgtaggtactttggacaatttctttgacctgggcggcgattcgatcaaggcgattcaaatcgtgtcgcgtgcgttccaggcaggctacaagctggacatgaaggatttgttccgctatcccatcgtcgcaacacttgcactgcatatgcatgaggtaagccgcatggtagatcaaggagaagtgagcgggcaaacggcattgcttccgatccagcacgggttctttgcacaggagcaagtagacgcgcatcactttaatcaggcggttatgctgcaccgggagcaggggtttgatgagtctgctctgcgtcaggcacttggcaaactagcagagcaccatgatgcactgcggatggtgttcagcaagaccgagcaaggctaccaagcatggaaccgtggaatacaggaaggcgagctgtaccacctggatgtgctggactttagcaatttgacggatgaagttatgctcagcacggcaattgagacgaaagccagtgaaattcaaagcagtattcaactgcaagaagggccgctgttaaaggctggcttgttccactgtgcagacggggatcatctcctgatggcaattcaccatttggtcgtggacggggtatcatggcgtattttgttcgaggatttggctgtagcttatgaacaggccatccgtgaagaggcgctccagttaccagacaaaacggattcattccgtttctggtcacaaaaactttccacctatgcgaatagcgcggccatggaaagtgaacacacctactgggaacaatggaacgcagccgctttgttagaccaagtacgtttgcctgaggatcaagggcaggctgagccatttaccctagctgacacggatacagtggacttccagcttacggaagaagagacagaaaaactattgaagcaagcacaccgcgcatataacacggaagtgaacgatctgctgctgaccgcattgggcatgacgctgtacacgtggacgggtcatgaacgcagtctgattcatttagagggacacggacgtgagaacattttgccggatacggacctttctcgtacagtaggctggtttacgagtcaatatccggtatggcttgacatcggccgtgatcacgctttatcggaatgcatcaaacaggtcaaagagagtctgcgtcatattcctaataaaggaattgggtacggaatctggagatatttgagtgaatccggccaagccattgctcatcaagcaaatgcattgaaccttggacaatataaagcttttgccgagccacaagtaaggtttaactatctcggccagtttgatcaggacttgcaaaacagcgatatccgtatgtctccttactcgatgggatcggtcattagtaaccggacgaagatgaaatatgtgctcgaagtgagcggaatcgtaacgaacggaatcctggaactggagattcgatataacggaaaagcctcccgtaagaacaccgtgcagatgctggctgatctgttgaaatccaatctgcttgaaatgatcgagcattgcgtcacacgggagcggaccgaattgactccaagtgatgtgctgtttaaaggtctgaccctggagcaattagatacgattaaggagcagacaaagacggttggggaattggaaaatgtgtacccgctaacgccaatgcaaaagggtatgctgttccacagtttgatgaatgcagaaacaggcgtgtattttgagcaggcgacctttgatcttgagggccactttgcaccgtccatattcgaggaaagcttgaagctactggttagtcgacatgcgatattacggacgaatttctatagtggctggcatggtcaaccgttgcagattgtctatcgtcataaaaatccgagcttcttttatgaggatgtcagagggtgtgaacaggctgtagctgaatttgtggcccaggacaaagctcgaggctttgatttaagcaaggatgcgctcatgcgcgtagctgtcttccgcacgggtgatcgctcataccgttttgtatggagcttccatcatattgtgatggacggctggtgcctgtccctgatgacggacgaggtgtttggtgcatatgttgccttgctggagaataagcagccagagctcgcacctgtcaagccgtatagtgactatatcgaatggttggaacatcaagatgcacgggaagcgacccgttattggagtaactatttggcaggttttgagcagcaaacattgttgcctagtgagaacgtgcaagcttctgtaatagaacgcgatgaagatacagacagaagcggtggaagttcaaattccggttatgtttcggaaaagctgccatttatgttgggtaaagaacggagtgccacattaaaccgaattgccaagcaacaacatgtaacgattaacacattgctgcagagcgtttggggcgttattttacagaaatacaataataatcaggatgttgtgtttggtagtgttgtatccggtcgtccggcagaaattgcaggcgtagagaacatgatcggtttgtttatcaacacgattccggtacggatatgcagtgcaccggatgctacatttgctgaagtattgcagcgtacacaggaacaggctttggcctccagtgtctatgacacgttcccgctgtacgacattcaggcactgactgaacaaaaacaagacctaattcatcacatcatggtctttgaaaactacccaatcgggcagcagatgaagcagatgggcggttccggcgagacaaaggcacaaacaggcttctctattgccaatgtggcacttgcagagcaaaccaactacgattttaatctgattgtcgtacctgatgaggatatctctatcctgtttgaatacaatgcgctggtgtataaccggtctgcagtggagcgtatctatggtcatatcaaccacatcatcggacaaatcgtggacaatccgcatatccatgtgaatgagctggaattggtgacaccggaagagcagacacagatcgttcaggtgtggggagatacggcggcagcctatccgcaggatcaaacgctaagcgcattattcgagcagcaggcagcgaacacgccggagcaagtggcggtgttgtgcggagcggaatcgttgacctacgcagagctgaatgagcgagccaaccgtctcgcacgcaccttgcgtgccgaaggggttgaaccggatcagccggtaggcattctggtccaccgttcactggacatgatcgtaggcatctatgcgatcctgaaggcaggcggagcctatgtgccgattgatccggaatatccggccgaccgcatccgctttatgctggaggactcaggcgcgaagctggtgctgacgcaatcgcatctggcggagcaagcatcgctgagtttcgacggccaggtgctgatactggatcgcgaggacatctatcacgaagatggctcgaatctggagccactggctggatcgcaccatgtcgcctatgtcatttatacctctggctccacgggaaaaccgaagggcgtgatggtggaacactattccgtgctgaaccggattttgtggatgcatgatcgctacgacttgagtgcgaaagatacaatcctgcaaaagaccgccttcaccttcgacgtgtcggtgtgggagctgttctggtggtcgatggtcggctcgaaggtaagcttgctgtccgtaggcggggaaaagaacccggaagatatcgtcgacacgattgcccgcgatggtgtgactacgatgcactttgtaccagccatgctgcatgcgttcctggagtacgtggaacagcagccacggaaagtgatgcaagcgaaactggacacgctgcgccatgtctttgccagtggtgaagcgttgccgccacaacatgtggcccggttccagcggctcgtatcgagcctgaccggagcgaagctgatcaacctgtacggcccaaccgaagcgacggtggacgtatcgtacttcgattgcgagccggatgaggaatatacggttatcccgatcgggaaaccgattcaaaatatccgtctgtatatcgtgaaggaaggcacggagcaattgcagccgattggggttgcaggggaactgtgcatcggcggtgtcggcgtagccagaggttacctgaaccgtccggagctgacggccgagaaatttgtgaaagatccgtttgccggaggcaaagcaggctatgaacggatgtaccgcaccggcgatttggcgagatggatgccggacggcaacattgaatatctgagccggatcgatcatcaggtgaaaatcagggggtaccggattgagctgggggaggtcgaatcgcagctgctccaggtggaatcggtacgcgaagcggtcgtcgtggcccgtacggacgaaatgggccaaaaccacatggtggcctactatgtcgcgggacaagtagtcgaggccagcaagctaagaagtgagctgggacgggagttgccaggctacatggtgccatcctactttgtacaactggaacagctgccactgacaccgaatggcaaaatcgaccgcaaggccttgcctgcaccagagggcagcctgcaaaccggagtcgattatgccgagccgcgcactatgcaagaacgcgctttggtagcggtctgggagtcggtactggggcttcagacggtcggtattctggacaatttcttcgacctgggcggtgattcgatcaaggcgatccaaatcgcctcccgtgcgttccaggctggctataagctggacatgaaggatttgttccagtatccaaccgttgaagccctggcaccgcatatgtacgaggtccgtcgtatggcagatcaggaagaagtcagcggggaaacggagctacttccgatccagcattggttctttgcgcaggagcgcgagcgtccacagcactttaatcaagcggttatgctctatcgcgccgagggttttgaggagacagcggttcgccaagccatggatcacctcgtgaagcatcatgatgcgctgcgtatggtattccatcagacttccgctggttatacagcttggactcgccatgtagaggaaggcacgttatatacactggaaatggtagattaccgtgaacagcccgctgatgcggaagcgctggaagcgaaggcaacggaaatccaaagcagcatggacctgtccgcaggacctttggtgaaactcggatggttccgcacagcggagggcgaccatctgctgatcgccattcaccacttggtggtggacggggtgtcgtggcggattctgtttgaagatttctcgacaggctacgagcaggcgatccagggcgagtccgtacgattgccctataaaacagattccttccaaacttgggcacgggagttatcctcttatgctaaccgtcctgaggctgcatcggatgaagtctattggaaacagctggaacaggtcaaagctgaagctgcaccgctacctaaggattttgcctacgaggattccgtgaatacagatagcgaagtgctgacagtagagtggaccgaagctgaaaccgagcaactgttaaagcaggcccatcgcgcctataacaccgaggtcaatgatttgctgctgaccgcgctgggactcgcggtgcacaactggacaggcgcaggacatgtactggtgaacctggagggccatggccgggaagcgatcttgccagaggtggatattacgcgtacgatcggctggtttacgagcttgtatccggtgctgctggagactggcaaggaaatgacactggcagagcggattaaagaaacgaaggaaggcctgcggcgtattccgcataaagggctgacctatggcacttggcgttacctgtcctctgcgtccggatcaggtgaagaccgtgcgatcgcagccgaaccggaaatcagctttaactatttgggtcaggtcgatcaggatctgcaaaacagtggaatcacgttgtcctcctaccgtgcaggggaaacagaggatgcccattcaccgttactgtacacgctggatttgaacgcgatgatctcagaaggtaagctgcgcttgacgatcgcttacagccgtaagcagtatcgtaaagaaacgctggaacgggtggcggggctaatgaaatctgctttgcaggaggtcattgcgcattgcgccgctcaaaagcagcctcagctgacgccaagtgatgtatccttcaaaggtctgacgactggagagctggaacagatcgcggaacaggcagcacgtatcggtgagctggaaaatgtatacgcactgaccccgatgcagaagggaatgctcttttacaatctgatggattcgcaatcgggagcttattttgaacaggcctcatttgatctgcgaggacattttaatatcactgcctttgcggccagtctggatgtcttggtgcagcggcatacggtactgcgtacgaacttctacagcggctggaaggatgaaccgcttcaggttgtgtaccggaataagcgcagcgaactgtatgttgaggatttgcgggatatggaggaagagaagcaaaacgagtacatgctcgaatttacgcgccaagataaacaaagaggtttgatctggcgcaggatgctttgatgcgtgtcgctgtgttgcgcacaggtgaggaatcgtaccgttttgtatggagcttccatcatatcgtgatggacggctggtgctgtcactggtgaccaacgaagtgtttgcgagttattttgcgatactggctcataaacagccggaactggcccctgtaacgccgtacagtcaatatatcgaatggctggagcagcaggatcgtcaggccgcatcaagctactggagcaaggttctggaaggatatgaggagcagtcccgtttgtcacaggcaaaaattcagggtaagacggggtatctggcagagcgtttagattttgatttggcgcggacctcacagctggtattcagcgcatagccaagcgttatcaggtgaccatcaatacgttgatgcagaccgtatggggccttttgctgcaaaaatataatggcaccgatgatgtcgtgtttggcagcgtggtatctggacgtccggcagacattcccgaacgtggaacacattattggtctgtttatcaatacgattccggtgcgtatccgcagtcaggtggacagcgtattctccgacgtgatgaagcacatccaggagcaatcgattgcttcccatgtgtatgatacgtatccgttgtatgaaattcaggggttgtcggagcttaagcaggatttgatccatcatattcttatttttgagaactatccggtagaagagcaaattgagcaattaggtagtagtgaggcgtccagcttcacgatcacaggagccggagtccgttgagcagccactatgactttacgttgtagtgctgccgggaacaccatcatatgagctttggctataatgcctgtggcctttgaacgggaaagtgtcgagcaaattcgaggtcatctggtgcagttgctggagcaggtgacagcgaatccgaatattcgcgtacatgaactggacatggttacgatgcaggagcgtaagcaaatcgttgaggtttgggggaatacagcggcagcctatgcaagcgagcaaacgattcacggcttgttcgaagcgcaagcattaaagacaccggagcagacagccttgttctttgaaggagaaacgctgacttatcgcgagctgaatgaacgagcgaatcgattggctcgtaccttgcgcagtcaaggcgtgacgaaggatcggctggtgggtctgatgaccgagcgttcggtggacatgattgtgggtatcttcgggattttaaaagccggaggtgcatatgtgcccattgatccaacctatccggaggaacgtatccgctatatgctggacgactcgggtgcgaagctgctgttaacacaaagtcatctgatggacaaagcagttatcgatggtcaagtactggtattggatggagagcaggaggtgtaccacgaggatggttccaatctggagccgctgtctggtccgaacgatttggcgtatgtaatctatacgtcgggtacaaccggacagccgaagggcgttatgctggagcaccacgggctgtgcaatctgaaaacgtattttgatcagacactcaagattagtacaacggatcatgcactgctgtttgccagctattcgttcgatgcggcttgctgggaaatcttccaggcgctgttctgcggggctacgttatacgtgccaacaacagagacgattttgaactacgagcggtttgagcaatatatggcggatcaccacatcacggtggccgctttgccaccgacctatgcggtgtatctggagccgcagcggatgccaagcctgcgtattctgttcactgcgggttcagcatcttccaccgaactggtatacaagtggaaggagcaggtggcgtattacaatggctacggtccaaccgaaaactcggtggcaacatccatttggccggtatccgaggatgcgagggcaggacagctcatttccatcggacgccctgtgccgaatcaccgggtatacatggtggatatccatggacatttggcgccggtcggcgtagcgggtgagctgtgcgtgtccggtccgggtctggcgcgtggttatctggatcgtccagagctgacggcggagaaatttgtagcgaacccgtttgcggcgggtgaagccggctatgaacgaatgtaccgtacgggggatttggcaagatggatgccagacggcaacatcgaatatttgggccggatcgaccatcaggtaaaaatccggggctaccggatcgaactgggcgaagtcgaggcacaaattctgaaagtggaagacgtgcaagaggtcatcgtactagcccaagcggacgagcaggggcaaaaccaactggtggcgtactatgtcgctgaaagagacgtaagcgctggggaactgcgcagcttcctgggtgaggagctgccaaactacatggtgccttcgtatttcattcagttggagcagatgccgctgacaccgaatggcaaaatcgaccgtaaggccctgccaacaccggaaggcagtctgcaaagcggagcggattatgtagagccgcgcacagcgctggagcagacgttggcttcgatttggcagtctgtattaggaacgaagaacatcggtattttggataatttctttgatctgggcggcgattcgatcaaagcaatccaggtatcctcccgcttgctgcaagcgggctacaagctggacatgaaggatttgttccaatatccatccatttcgctgctgagtggtcatgtacacccagttagtcgtacggccgatcagggcgaggtttcgggcaacgtcaagctgaccccgatccagcagtggttctttggactatcgtcggcagagccgcactattttaaccagtcggtaatgctgcatcgagcagaaggctttgatatagatggattgcatcgcacggtgacccaggtgacggagcatcatgatgcgctgcgtatggtcttccgtcagaccgaacagggctatgaagcgtggaatcgcggtgtgaacgaaggcgagctgtatcatctggacgttgtagatttgacaggcgtcgaagatacggcagatgtgatgatggcgattgagatgaaagccaatgccatccaaagctccattcatctggatgaaggaccgctggtgaagctgggacttttccgctgcatggatggagatcatttactgattgccattcaccatttggttatagacgggatctcatggcggattgtgtttgaagattttgcgactggatatgagcaggccgttcggggagaagcgattcgcttgccttataaaacggattcgttctccacttgggcagagcggttgtctcaatatgcgaacagtccggccatcgataacgaacgcgaatactggcagcgtcttgcccacgcggaagtcggctcgctacctaaggatcaagaaagagcggcaggccagcatttttgggttcgagacagtgagacggtgaccgtggcttggagcgaacaggacacccggctgctgcttcaggaatcacatcgtgcgtaccatacagaggtcaatgatctgctgttaaccgcactcggtaccgcattataccactggagtgggcaggggcgtgtgctggtcaatctggaaggccatggccgggaggctattgttccagatgtggatatcacccgtaccgtgggctggtttacgagtcagtatccggtactgctggatgtggatggaacatcagaagtagggcagcgcatcaagcgggtaaaagaggacctgcgccatgtcccgcataagggcattggctacggtattttgaagtatatgtcttcggataatgccgatccttccttgaatctgcagcctgagatcagctttaactatttgggacaatttgatcaggatttggaacaaagcgatatcgtgctgtcttcgcattcagatggagagccaatgagtgatcataccgtgctggagcagccgctgaatgtgaacggcatgattacagcaggcgtgctgaccctggaaattcgctatgacagccaagtatatcatcagcaaaatgtagagaagtttgcgcagttgctacgggaaagcttgcaggaagtcatcaagcattgtgcctcccaagagcggagcaaactaacgccaagcgatgtcttgttcaaaggcttgtcgttggaacaactggagcaattgacggagcaaacggcttctgtgggtgaactggaaaatgtgtatgctctttctcccatgcagaaagggatgctgttccatagcttgatggaaccggactcaggcgcatacttccagcaagcctcgtttgatcaaaaaggcagcttcgatgttgctgttttccgtcagagcctggatctgctgacacagcgccatgaagcgctgcggacgaatttccatcggtttgagaccggacacggtcaggagccattgcaactggtgttccgtcacaaagatagcgatctgtccttcaaggatgtacgcggaatgcagccagcagaacaacaggcgtatatccaggcgttgaagcaggaggatcaggctcggggctttgatctcggtacggatgcactcatgcgcgtacaggtatggcagaccgatgaagagacgtatcactgggtctggagcttccatcacatcatcatggacggctggtgcttatcgctcgttaccggggaagtgtttggtacgtactttgcgctgctggagcagaaacagccggagctggctccgatcacaccgtatggccaatatatcgaatggctggagcgtcaggacgaacgtgcggcaaaagagtattggagcaactatttggcaggctttgaacagcagacgttgctgcctggatcggatactgcatcgaaagaccacgtgacggacagcagggaacatgcggtatcctcgacagcaagcgaagccagcgaatatgtttctgaaaaagtaacggtagatctggatccaacgtggagcgaagccatgtaccggattgccaagcagcagcaggtcacgattaatacgctgatgcagagcgtgtggggcgttattttgcagaaatataataacaatgaagatgttgtattcggcagtgtcgtatctggacgtccgacggatattgcgggtgtagaaaatatgatcggtttgttcattaatacgattccggttcggattcaaagtgagcggaatgccacgtttgtggacatcatgcggaacacgcaggagcaagcgctggcttcgggggtatatgacagcttcccgctgtatgaaattcaggcgctgaccgagcagaagcagcatctgattaatcacattatggtatttgaaaactatccggtagaggagcaagtcgagcagttgggtgaagttcgtccgtctgcatttgacattacgaatgtagaggttgttgagcagacgaactatgatctggacttgattgtgatgccggatgacaccttccgcatcatgttcagatacaacgccaatgtatacgatcggtctacgatcgagcggatgcagggacatgtactgcatgtcatcgagcaaatcgtgaacaatccgcatatccgtgtgaatgagctggaattggtgacaccggaagaacaggcacagatcattcaggtgtggggagatacggcggcagcctatccgcaggatcaaacgctaagcgcactgtttgagcagcaggcagcaattacaccggatcaggcagcggtaatattcgggtcggagatgttgacctaccgtgagctaaacgagcgagccaaccgtctcgcacgcaccttgcgtgcgcaaggggttgaaccggatcagcctgtaggcattctggtccatcgttcgctggacatgatcgtaggtatctatgcgatcctcaaagcaggcggagcttatgtaccgatcgatccggaatatccggccgaccgcatccgctttatgctggaggattcaggcgcgaagctggtgctgacgcaatcgcatctggcggagcaagcatcgctgagtttcgacggccgggtgctggtgctagaccgtgaggagcaggctggcaagaatatttatcacgaagatggttcaaatctggagcccctggctgggccgcaccatgtcgcctatgtcatctacacctccggttccactggaaaaccgaagggtgtaatggtggagcaccattccgtgttaaaccggattttgtggatgcatgatcggtacggcctgggtgcagaagatacgatcctgcaaaagaccgccttcaccttcgacgtgtcggtgtgggagctgttctggtggtcgatggtcggctcaaaggtaagcctgctgtcggtcggcggggaaaagaacccggaagacatcgtcgacacgattgcccgcgatggcgtgactacgatgcactttgtaccagccatgctgcatgcgttcctggagtatgtggaacagcagccacgagaagtgatgcaagcgaagctgggcacactgcgccatgtctttgccagtggtgaagcgttgccgccacagcatgtggcccggttccagcggctcgtgtcgagcctggccggagcgaagctggtcaacctgtatggcccaaccgaagcaacggtcgacgtatcgtatttcgattgcgagccggatgaggaatatgcggtgatcccgatcgggaaaccgattcaaaatatccgtctgtacatcgtgaaggaaggcacggagcaattgcagccgattggggttgcaggggaactgtgcatcggcggtgtcggcgtagcacgaggatatctgaaccgtccagagctgacggccgagaaatttgtagctgatccgtttgccggcggggaagcagggtatgagcggatgtaccgtaccggcgatttggcgagatggatgccggacgggaacattgaatatctgggccggatcgaccatcaggtgaaaatccgggggtaccggattgagctgggcgaggtggaaacgcagttgctccaagtggaatcggtacgcgaagccgtggtcatggctcgtgcggacgaaacgggacaaaaacacatggtggcctactatgttgccgggcaagaaatcagtgccagcgagctgagaagtgcgctggggcaggagctgccaagctacatggtaccatcgtactttgtacagctagagcagatgccactgagtcccaatggcaaaatcgaccgcaaggcactgccagcaccggaaggtagcctgcaaagcggggccgagtatgttgcacctcggacatgggtggaagtgaagctggcgcaaatctggcaggatgtactgggtctcactcaggtcggtgtgaaggaaaacttcttcgagattggcgggcactcactacgggcgacgacactggcctcgaagattcacaaagagctgaacaagccacttccactgcgcagtatttttgaagcaccaacgattgagcaacaggccgttgtactggaacagctggaccaagtaacctatgcgtccattccagtaacggaagagcgcagcttctatcccctgtcctcggcgcaaaaacgactgtatgtgctgcatcagttcgatccgaatgatgtgaactacaacatgccgtcggtgctgcaagtgagcggtccgctggacgtgaaacgagtggaacatgtattccgtcaactgatcgcccgccatgcgaccttgcgtacccgctttgagctgatcgtcagtgagccaatgcaatggatcgaggacaccgtaccgttcgaggtggaatatacgaaggtacaggcagagggtgcgactgcggatacagatcaggacacaactacagatacgtacaccagggtcaacatagaggcgcaacagctggtgcggcgctttgtccgtccgtttgatctcaaagctgcgccgctgctacgagtaggcttggtggatctgggcattcaaggagtagaacaggaatcccaacatctgcttatgctcgatatgcaccatatcgtctcagatggggtgtccctggaggtcctgactgatgagtttgtccgtttgtatggcggtgaagagctggcgccattgcggattcagtacaaagattatgccgtatggcagcaaagcgaagcccatcaggaatggatgcagcgtcaggaagcgtactggctgaacaccttccgaggggaactgcctgtgctggatctctctacggactttgcccgcccagcggtgcagagtacagcaggggatacgatcgaatttgtactggagcgtgaggttagtgaacgcctgaaagaactggctgcccagaccggctctaccctgtatatggtgatgctggctgcgtacaccacactcttgcacaaatacacaggccaagaggacattgtagtcggtacgccgattgccggacgaccgcatgcggagctcagtaatctggtcggtgtcttcattaacacgctggcgattcgcaattatccgtccagcgacaaatcgttccttgagtatctgcaagaggtcaaggagcatgcgctcagtgcttatgagcatcaggactatccttttgaagaattggttgaaaaattgaatgtagcgcgggatacgagccggaatgcgctgttcgacacgatgtttgaattgaaaacgttggagcagcgggagttcgagctgaaagggctgaccttgagctcctatccactggataatcaaacggcaaaattcgatctgagcttggaggcgatagagcagccggaaggcattctgtgcagtctggaatacagcacagtgctgtacaagcgggagaccatcacgcgattggcacagcattttgcggaaatcgttcgagcgattgcctatcatccacagcagccactggcagttttgaatatggtaaccgatgaggaacaagagcaactcatctacggttttggagaagtgggcgtaacggatgttgctgttgaagcaggagccatgttccatacctatgtggaaaaacaggcacagcttataccagatcaagtggcggtggtatacgaggagcaacagcttacgtaccggaaactgaacgagcgtgcgaaccaattggcgcgtagattgcgaaatgaaggtatcggacgcgaatcgattgtcggcatttggagtgagcgctcggtagacatgctggtcggcgtactggcagtatggaaggctggtggcgcatatgtaccgctggatgcggattatccgtccgaacgcattcgtttcatgctggaggacagtggtgcgacggtgttgctgacccagacgggattgcaggagcgc

SEQ ID NO: 227 - protein, 491 aa, Paenibacillus polymyxa
  REGION 1..491: note = strain Sb3-1
MNYHDPVDPILKQFLKSRAQDLVIPNTVENAVGYALSSLSDQNMKKRSFLKRWRWAAAAVAFLFVLGAVSILTVPTFAEVFRSLFAKDNPDIGLMRAQELGLVINPHIKVKDKGYTLVINEAVADPTRVTIALQLFDENGRHDRHKLAIGEANKITIKDDKGNVVGSMYDMGYTSDFYYMVDFFSDPLKTDKITIEGSIGSLGQRSETLIKGNWDFSFDIDMKKANKQNKIEELEGSYTTPHGMTVTLKRLTRMVQGVRFELETELDDAAMTRSPGDLWKKQMLSFHFETTDGQEIHSVNPRKKNYRDSLMTSDRRVIGNGKMHWSYTFKYLPEDKPYRFVLDAYSVAEMDGNKISFRPSELTKPKTFKIMNDRLELVRASLEKSQVNKGSYETVISFYGKMDNEIMHEEWRAFDSAGKQYDVSAVGGSSFENTLTDHWREGYISMGDRRAKQPYEFRIMKLDPIPEELTLVREVVDKRYKDPNWSVLLGK

SEQ ID NO: 228 - protein, 175 aa, Paenibacillus polymyxa
  REGION 1..175: note = strain Sb3-1
MDLTEKAELATQGDKEAFVDVIRAVQQSLYVIARSIVKNEEDCADAIQETIAKAFSNVHRLKEPAYFKTWIIRILINECNRIIRKKKRVSPVPYDIRKSSYKGDYEQIELFEVIDGLDVQLQTTVTLFYIEDLSVKEISKVLNVSEGTVKSRLFRARQQLSELALWEGEAKYELS

SEQ ID NO: 229 - DNA, 384 bp, Paenibacillus polymyxa
  source 1..384: mol_type = genomic DNA
  misc_feature 1..384: note = strain Sb3-1
atgtatttaccgtctctaatcacaggagtactcgttgataaatttggatacatttttatggcttatgcttctggctttaccttgatggtgtctggattgttggctgccttcgtacctggtgattcgatgggtttacttactctcgcgctggctcttgtgggatgaggttggaactttggtttgattagtgggactgcggcgattgtcgaggcaaccccatccaatgttcgtgcaaaaactcaaggaacagtggatgtactgattgcattatcaagagcatctggaggagcactatctggtatggttgtggcacactccagttatcatatactgtctttaattggatcagttttgtcactgttccttattcctgttgtggtttga

SEQ ID NO: 230 - protein, 56 aa, Paenibacillus polymyxa
  REGION 1..56: note = strain Sb3-1
MVETIPENKQTSVQIPPSIMDYMESPLKQLQLHARTMKVVVASQICGGAGLAAGIP

SEQ ID NO: 231 - protein, 148 aa, Paenibacillus polymyxa
  REGION 1..148: note = strain Sb3-1
MANQKLSLNTVWYGNAKGNGIIKSENFQTQIAIPVSKGGSGEGVEPKKLLMSSAAACYLMTLTYMLEQNRIPVSGLSMDTEGNTAPNGQLSITHRPHIVLKKSEATNQDVSMAETLMRNAEENCQIGQLLVKADVQITIEGHVSFEAE

SEQ ID NO: 232 - protein, 95 aa, Paenibacillus polymyxa
  REGION 1..95: note = strain Sb3-1
MAKAYLQITLKINAPEREAATKVYTAYKEPFLSGISGAVSKELLVRDEDVQVLHGFTSEADAKAYLESDLFTNDVVVGLKDLLQAEPEIRIYSTF

SEQ ID NO: 233 - protein, 222 aa, Paenibacillus polymyxa
  REGION 1..222: note = strain Sb3-1
MKEPLSSANVLKEDLYKQLARIGKCLSSDKRLEILNVLSQSPKTVEKLAACTGMNMANVSRHLQILLDAKLVKFAKRGTYAIYSLADPEIIDFMASLWRISEKQLPDIAKLKEDFLNNLDGIQTLTMDEVMEKVNNDSILLVDLRSKEDFEMGHISGAISMPMTELDTLMQELPKDAEVIAYCQGPLCVYSALAVQKLQQEGYKAYRMDEGINEWQGHFLTH

SEQ ID NO: 234 - protein, 191 aa, Paenibacillus polymyxa
  REGION 1..191: note = strain Sb3-1
MNIKKNTVQEIMDIGLTLVQERGYNGFSYADIAEAIGIRKASIHYHFPSKQDLVQAVLNRYRREFMDKLQQINDQPLSWRQKIQSFFLLYREHLENNTKLCLCSMMAAELNSFPIEIRDELNLFFDANTLWVENVLDQGKSAGEFTFSNAALEQAKILIAFVQGAQLLSRTSSEKGYFDSLVLNYMATLTQ

SEQ ID NO: 235 - protein, 114 aa, Paenibacillus polymyxa
  REGION 1..114: note = strain Sb3-1
MNKELLSIEEIDAFIQNNRLSMLYFSQENCNVCHSVYPKLKDLLTKFPSIKLAHVDTSNVEEVVGKFLIFSVPTIIMFIDQRESFREGRFVQLGPLAARLQQLNDFWLKSNSGL

SEQ ID NO: 236 - protein, 367 aa, Paenibacillus polymyxa
  REGION 1..367: note = strain Sb3-1
METQLNRDAPVIIVGAGLCGLRAAALLNTHGIRYLILEARNRIGGRGLSVEVEGKPELGKFDLGPTWYWPRYEIAMNQLVEELSLQTFEQYNEGRMLVERSRNTPPQQHDLSAEAMEYSLRFIGGVQSLIDALAAQIPSEAIYLNTKVTSIHQEDDSRVKIQTDAGNFHASSVIVALPPRIVERNITFFPKLSAELKSNLMNKPTWMASQAKVIAVYDTPFWRDQGLSGFVSSWVGPLREIHDASPSRGSGALFGFFGLPAKARLNMGNEQLLELVLEQLTRLFGPAAKHVKGTLFKDWSFDEHTAVEEDTDPLLDYPSYGPIIDGKGSMQNIYFAGTETAYRQGGHLEGALRSAERVVNEVIKHLS

SEQ ID NO: 237 - protein, 256 aa, Paenibacillus polymyxa
  REGION 1..256: note = strain Sb3-1
MEFENKTVIVTGGGTGIGKTTAQRFYEEGANVVINGRREDVLKKTALEIDPSGKKVIVVSGDISLPETSKKLVQAAVEAFGGVDILVNNTGKFNPTPFMDHTADDLQSYLDTIVKGTFYPSQAVIPEMKKRGGGAIVNTGSMWAIQAVESTPSSAYSAAMAGRHALTRNLAVELAGDHIRVNAVAPAVVETPIYNTFMSEEQVAEVLPSFNAFHPIGRNGTTKDVAEVILFLASDSASWITGVVMPLDGGVTARLR

SEQ ID NO: 238 - protein, 105 aa, Paenibacillus polymyxa
  REGION 1..105: note = strain Sb3-1
MSATALTNQTFNNQIQSGITLVDFWAPWCGPCQIQLPIIHQLADDLKEKATIATINVDEQTELATRFGIRSIPALLLFQDGKLMDTMIGINQRDVLEAKILKLMN

SEQ ID NO: 239 - protein, 322 aa, Paenibacillus polymyxa
  REGION 1..322: note = strain Sb3-1
MKAIQVPAKGEPMKLVEIPIPVPAQGQVLLRIEACGVCSGDASTISGAAPEYPRIPGHEVIGIVEQLGDGFTKWEIGQRVGMGYHSGDDHVTGLTMDGGYAEYMVAFEEALILIPDEVSSEEAAPLMCAGETTFSALRNSSARPGDLVAISGIGGLGHLAVQYAKKAGYQTVAISRGVQKENLAKELGTHFYIDSEKEDPAKALKALGGAKVILATAPNAGVISSLVNGLGTDGELIIVAGSRERLELSAMDFLKGPHTVKGSFTGKAKEIEAAVRFSVLTDVRPIIEVFPLERASEAYEKMMAAKTRFRAVLSMSAENKAK

SEQ ID NO: 240 - DNA, 1163 bp, Paenibacillus polymyxa
  source 1..1163: mol_type = genomic DNA
  misc_feature 1..1163: note = strain Sb3-1
atggctaaaaagggacaatcattccggcaatactccttagatgtaaagatggaggcagtccggttggtgaacgaagaacatatgagtattcgtgaagtgacgaaacaattggacattcgtaataaatcccaagtgcaaagctgggtgatgaaacatcgagcgggggagaacctccagccaacgaccacaaggcagggacgacccaaaacgaaattttccagtatggaagaggagatggcgtatctacgggcggagattgaatatttaaaaaagcagtatccaaatctacacaaggagtgacgaggaaagaagcgaggtttgaaattattgagggaatgcgaacacgatattcgttgaaatggttacttgaattagcccatgtttctcgggcaggatattataaatggagaaagactcagcaaacaacccagcagcgtaagcaagaagaagagcttctggaatcgcatatgttgtcgatccaccggatccatccctattttggttatctgcggatgaccgttgctttacgtagagaaggtatcttggtcaatcacaaaaaggtgtaccgcctaatgaagaaattagggatccgttccgtcattcgaaagaagcggcgcttttttggcaaacaggcatctgtggtaaatgccaaccgattagatcgacaatttcaggcagattctcctttatccaagctggttaccgatattacatacatacgagctggagagcggtttgtatatctctctgtcattcaagatctgtttaacaatgaaatcgtggcttggcgtctttcggaacgaaatgaccttgctctagttagcgagacgctagacgttctaagtaagaacgtgaacatgaagggtgtcattctccattcagaccagggttttcagtatacctccaagccgtttaaccgcaagcttaagcggcttggaatgcttgggagccattcaaggcgtggaaattgcctagacaatgcctgtatagaatccttcttctcccatcttaaaacagagaagatttatttaacgaaacccggaaccctagcggaggtagaacaacacgtacgggagtacatttctttttataatgaaaatagatttcagaaaaaattaaacaaccgttccccgattgaataccgagaaacggttgctgcttaa

SEQ ID NO: 241 - protein, 616 aa, Paenibacillus polymyxa
  REGION 1..616: note = strain Sb3-1
MDKNEHTVGSKYIKMKQQGPMGRGPTEGMGTGKKANDFRKNLRQLLSYIKAYAPMIILSMVLALAGSVFNVIGPDKLSDIANLIQEGIVTGIDINAIQKIVLVLVVLYGLGLIFNYFQGFITVTVSQRLTKKMRTELSQKINHMPLKYFDATSYGNVLSRVTNDVDTIGQTLNNSLGTLVSALATFVGALIMMLYTNWIMTITGIVATLIGFSLMTVIMKHSQKYFVAQQAELGQINGHIEETYAGHNVVKVYNGEKAAKEVFHGINGRLYTNAWKSQFMSGLMMPVMMFIGNFGYVAVCIVGALLVNQHVITIGTIVAFMVYIRLFTQPLSQLAQAATNLQSAAAASERVFEFLDEEELKDESDKTMKLDNAKGDVEFKHVRFGYNEDHMIIKDFSMKAEAGQKVAIVGPTGAGKTTLVNLLMRFYELNGGEIYIDGTPISQLTRENVHKLFCMVLQDTWLFEGTIRENIVFSQDHVTDEQVEAACRAVGLHSFLKTLPQGYDTVLDDKAILSAGQKQLITIARAMIEDAPMLILDEATSSVDTRTELLIQQAMDRLTVGKTSFVIAHRLSTIKNADLILVMKDGNIIETGNHGELLGKGGFYADLYNSQFENAS

SEQ ID NO: 242 - protein, 589 aa, Paenibacillus polymyxa
  REGION 1..589: note = strain Sb3-1
MLKIFKYLKKNEWMFVLCSLAFIVVQVWLDLKLPDYMAEITTKLQTAGTPMSELLIPGIYMLLCAVGSMIASIIVGYFAAKVAAGLAMRLRAMVFDKALSFSMEEMNSFSTASLITRSTNDVTQIQTVVALGLQVIIKAPILAVWAIAKIADKNWQWTASTGVAVAVLILMLSVIVIFALPSFQKIQRLTDNLNRVTREHLTGLRVVRAYNADQYQEEKFGQANAELTNTNLFANRLMAMVGPGMTFIMSGLSVSIYWIGTYLINGAAVPDRITLFSNMVVFSSYAVQVVMAFMMVSMIFFLMPRASISAKRIMEVLNTESRIIDGHETAGEEGVMGQVEFRNVSFKYPDAEEPALRNISFTAKQGETVAFIGATGSGKTSVINLISRFYDVTEGEVLVDGVNVRNYKQQTLHNKIGYVPQRAVLFSGTVASNVSYGDNGRAEVSEKLVKAAVEIAQGTEFVEKMDGQYQGRISQGGANVSGGQKQRLSIARAIYRQPEIYIFDDSFSALDYRTDRVLRSALKQETGHATTLIVAQRIGTIKDADRIIVLDQGEIVGNGTHEELMANCSTYQEIAYSQLSKEELVHGQE

SEQ ID NO: 243 - protein, 135 aa, Paenibacillus polymyxa; identical to SEQ ID NO: 179
  REGION 1..135: note = strain Sb3-1

SEQ ID NO: 244 - DNA, 954 bp, Paenibacillus polymyxa
  source 1..954: mol_type = genomic DNA
  misc_feature 1..954: note = strain Sb3-1
atgagtaagagtgtgacacattcatttgtactgcctgacaaggctgaaaggcttcggctattcggttcagttgatccaattcagggagacaaacctgttctcaaagaagagatgcaagatttgcaaaatagcaaaaatgattttctgtttgagttacagcaagtaggcatcgaaaatttgaagtatcctatcgatgttatttcggtaaaaagtcctgtaaaggtgtccagcattggcaattttcgactgactacctcactggagcgggaatttaaaggcattaatatgagcagattggcagaacagcttcagtatagtcgcaatgagggactgagtgaccaaattacagatttacttagactgacgcagcgaattgccgaacagatgaatcaacagaaatcacaactggaagttacctatccctggttctataaccgtgctgcacccataacaggtttattcgggttaaaccattcattggcttcgattactgtgacataggaggcaggtaagtctcctattattaaagcaggtctaaatatacagattacaacgttatgtccttgttctaaagaaataagtgaatatagtgcacacaatcagcgtggtatgctacgaattcaggtacagggcaaccctggagaattattgccaagtgattggaaggaaaatctgttggatgccgctgaatccaatgcaagcagttgccttcatcccgtattaaaaaggcctgacgagaaacaggttacagaacgtgcgtacgagaatcctcgatttgttgaagacgtagtgcggttggtggctgctgatttgtatgaaaagcattgggtaagtaaattcaaggtggactgcagtaatgaagagtccattcatcagcatgatgcgattgcacgcattgtgtatgataagtccagagcgtatgaatgtgttgatgattactttactttaatctag

SEQ ID NO: 245 - protein, 336 aa, Paenibacillus polymyxa
  REGION 1..336: note = strain Sb3-1
METEQDPRIPVTIITGFLGAGKTTLLNHILKADHGYKIAVIVNEFGEVGIDNELIVESGEEIIEMNNGCICCTVRSDLVDIMKSLLHRKFAETLTPVEYDRIVVETTGLADPGPVIQTFLAEPLISNFFKIDAVITVVDAKHAEHHLDNGHEAKEQVAFADVILLNKIDLVEKEDIARLESRLKKMNSHARLTHTHQSLIDLDQIFGVNTFDLDHKLEVDPHLLEEHHHHHHDDDIFSIILTETRPLDLDKVNKFINDWLVEHSADTYRYKGILNVQKTNKRVVFQGVHMIFGVDTDREWNVDEDRTSRIVVIGKDLDEDWFRARFSECAVADGGV

SEQ ID NO: 246 - protein, 89 aa, Paenibacillus polymyxa
  REGION 1..89: note = strain Sb3-1
MAKKSKVVREKKRQETVAKYAELRRQLKERGDYEALQKLPRNASPTRLKNRCELTGRPRGYLRRFKVSRIVFRELAHKGQIPGVTKSSW

SEQ ID NO: 247 - protein, 84 aa, Paenibacillus polymyxa
  REGION 1..84: note = strain Sb3-1
MILSDRTLRTLIRQKRMTVSPLTEEQIQPASIDSEETLIPPLSFMLATTIETIRLPGYITAFVEGRISIGRMSLFMKRSDPTCI

SEQ ID NO: 248 - protein, 267 aa, Paenibacillus polymyxa
  REGION 1..267: note = strain Sb3-1
MNNKSKSNAAVRLPRAKGIDMATIYTPKECARKVKRIVLAEKNQTIVDEFITILGMKEKFEEQDVPMPNKIVMFGPPGTGKTLTAFYLAQRLDLPLILVRLDAIIHSHLGETASNVRKIFDYANGTPCVLFLDEFDALGRMRDSNDEVKEMARVVNTLLQCLDEFGGESVFVAATNLEEELDTAIWRRFDTKMTYTLPTHADRIQYIELLIGESLAGQAADLLAGCSFADIEQIVLKAKRKAIIENRALNFENIENALSEYNPRMKV

SEQ ID NO: 249 - protein, 183 aa, Paenibacillus polymyxa
  REGION 1..183: note = strain Sb3-1
MLKRILLVSIVFCLVISTFGFTEKTLPKAAASTGFAHPGLLHTKEDFDRIKQMINEGRQPYLDGWNQLLSSPLSQAGWKPRATSTIIRGGSGQNVAVFYNDIARAYQNALRWKITGDTANGDTARDILNAWSSNLKTISGNADRYLAAGIYGYELANAAELMRDYPGFNVEQMQNMLLTVFYK

SEQ ID NO: 250 - protein, 722 aa, Paenibacillus polymyxa
  REGION 1..722: note = strain Sb3-1
MRARTLKASTRNVIGSYYKWIAAGMIVTLTGCSLASAAPSPSLSSSSKTSEPTSSLVTFQLQEATIAQMQDAMKSGALSSVELTAMYLNRVYAYDSSGIQLNSIPVLNPDVLKEAAQADQQRAQGINTGPLQGIPYTVKDSYKVKGLTVASGSPAFKNLMAKDDAFTVEKIRKSGGVLIGKTNMPPMAAGGMQRGVYGRAESPYNPDYLAAAWYSGSSNGSGVSTAANLAAFGMGEETVSSGRSPASNNGLIAYTPSRGLISIRGNWPLFPIRDVVVPHTRTVEDMLRLLDVIVVEDKITKGDFWREQKAVRLPSVNSVRPNSYLELRDTQALKGKRIGVPKIYIGKDSETTTPIKFRPSIQALWEKAVKDLTALGAEVVEVDFPLQVNSEKDRPTAKTPEERGLMPAKWAEKEFGLLNPYVAEEFLKSVGDPNFPSWANIDPATVFPNPPGSVDAKRGRDLGHYDVFIDTIKKGVTPYEQIPQFQEGLRGLENVRKIDFENWMKQNNLDFIVFPANSNIGKADSDVNETSYEEAWENGNYFSNTNFLLREYGIPSVSVSMGAMKDTGMPVNLTMAGAAYSDNDLLRYAYSYEQATKNRPIATRTPALEDETFSYNPQTALPPSKRKETEAPALKLNASLKGDILALKGSVTDQSEIAQLKVYVNGMRVAITEDKANWSATLPTAIYKQSGASQADTLHILLLAKDIYGNTSAQIKSVTLPQ

SEQ ID NO: 251 - protein, 173 aa, Paenibacillus polymyxa
  REGION 1..173: note = strain Sb3-1
MNAKIIKCSRADLQTLQEISIETFNDTFKEQNSPENMQAYLERAFNSKQLEKELSNVSSEFFFVYFNGELAGFLKVNINDAQSEKMGDESLEVERIYIKNKFQKHGLGKYLLNKAMEIALGHNKKKVWLGVWEKNENAIAFYKKMGFVQTGAHSFYMGDEEQIDFIMTKSMIL

SEQ ID NO: 252 - protein, 150 aa, Paenibacillus polymyxa
  REGION 1..150: note = strain Sb3-1
MKEVLREIGMIARALDSISNIEFKEYDLTKGQYLYLVRICENPGIIQEKLAEMIKVDRTTASRAIQKLVINGFIEKKEDQHNKKINKLFPTEKGNNVYPFIKREHDYSDNVALAGFSESEVNTIFNLLQRVRKNISDEWEFVKKGNKRIY

SEQ ID NO: 253 - protein, 214 aa, Paenibacillus polymyxa
  REGION 1..214: note = strain Sb3-1
MKYVFFVIGIFILSLGISFTIQSDLGTSPFDALLVGLSTNVGLTVGSWEIIMALILICCNSLLNRQRPEVLGLLTAFITGIGIDMWLFLLQDVLTPELWYSKVVCFGIGLIAVGLGTATYLQTNFAPIPVDRLTIIVQELTRTNLFFSRTFIYLIFLVIAFILNGPIGIGTLLTVGLGGLILNYFMPLTGKVLDRILTHSGTSPNHDKDKKHSI

SEQ ID NO: 254 - protein, 295 aa, Paenibacillus polymyxa
  REGION 1..295: note = strain Sb3-1
MFHGLSAFPLTPVNETGIDEKAFVTLIQRLVAAGVDSIGTLGSTGNYAYLNREERLRVLQLAVHSAEGIPVMTSISAIRTLEVLRLAEDAQRAGASAVLLAPISYQALTNEEVFSLYEQVTSSLSIPLCVYDNPGTSHFHFSDELHGRISELPNVGSIKIPGVPTDPEAAKTRIKKLRGSIPPHVTIGVSGDSFAVTGLNAGCEAWFSVLGGLFPQACLNMTRLAQDGFADEAERLSALLEPIWTLFHQYGSLRVVSAAAEISGLITSPSLPLPLQPLNPSAREYLKLILNNLQE

SEQ ID NO: 255 - protein, 1215 aa, Paenibacillus polymyxa
  REGION 1..1215: note = strain Sb3-1
MKSHQGTQNKFELLKRNHTVPASVSEMENSAVHLAFCNLMRDIDWVCGCKLVRAKEMDQSSIVIGTITDNEPLLAYLQEKGVSLKKLALEDGSYRWEAFLQEVIDGVLYIIGTDRRGTIFGIYDLCEAMGVSPWYYWADVPVKTYDVFCLPLDYSKADWPAVQYRGIFLNDEEELDDWAKIHTQDGTIGPAAYQSIFELLLRLKANFIWPAMHVNYFNENPENGALAEKMGIVVGTSHCDMLLRSNQNEWEPWLAAKGYDDASYDYSIEGRNREILQEYWRESVEKNKNYEVCYTVGMRGIHDSGFHTQAIDEDHSMTKEERAEAKCSLLGKVIQDQKQILKDVIGESKENASLQTFIPYKEVLELYDRGLDIPEGVTLIWANDNFGHMRRYPNEKERQRSGGNGLYYHNSYWAAPGTGMSYLFINSIPLAHTENELKKSYESGIRKLWILNVGGLKPLEQDMEFFLRSGWEAGKEEGMTKNASQFVESWINANFSGNHGPEVAELYETFAQVTNVRKIEHMQSNVFSQTVLGDEAGRRLMRLEDIFRRGNAIMYSLPVQERAAFFQMFLMKIHASYYTNHEFYFADRSTLSYERGNMQAADRYVELSIKMADYKRRMLHFYNAKMSEGKWNGILTPESFPPPPTALYPARKPALKIAQGGMRIDLWNEETTLRFSIHGQKQKWFEIGNQGNGTIPFTIEVMEGEDWIILSESEGLIQTEKRILVSIIDPHQHAGKTGQLTVRNHKDMTSVPIKVQVEEGVNVPETFYGHIEADGYVSIPAASYDHNVPGADSTDKSGWVVIPGMGRYEGAAMMAWNGELRPLGGELKNHPYLGYDIFLKEAGQFTLEIHRFLTLNSTGNIRFGIGVDDIAPILVESETRDEWLGTWQESVFNNGEKIRVELPYLASGIHALRIYMVDPYVTINKLVIYTNEQKTCNLGPIASQHYHRLVTDHGLESPTVNWNEIEQLCNQFYETGEHEVPLPVVLYATRDFYATIDEIFLKCFDVPQTTLGDKRYVDICDADGTKDVIKEFGAGMFIESNSIVAIEAEYALEDSENAYLTSSKDGNAIDWSHVQAETNGRTGFAMHVSEPGRQWENPEIAPAMHYKINITNSGNYHIWILVRHHNGQSDSCYLSLDGVVRPLSEQLGQGTLHTYNTAQVYYWCLLSDLELTRGDHLFSILARKSQLRVDRIYMTQGNELPPVDALWTDSIRKQP

SEQ ID NO: 256 - protein, 271 aa, Paenibacillus polymyxa
  REGION 1..271: note = strain Sb3-1
MIADVSHMHPLFSIEYVVHDADHNMTNFHYHDAYELYFLEKGYHQILIQDSIYDIELHDVALFKPNLFHRSYQNQGCARTCVYFTERFLRLYFTERAIKSLLGCFDTEIIISLNQEVVAKVKRLLKSLEKENVSGESDRIFILLAELLSLLNNNKDSQTVEQQSSKYANFGPILSYINQNYNKITKIEDIAKSFYMSQYYLCHRFKEVTGLTVIQYLNNIKIQHACNLLINTKLTILEIGNECGFNSSMYFCKIFKQTIFMTPSEFRKKAR

SEQ ID NO: 257 - protein, 284 aa, Paenibacillus polymyxa
  REGION 1..284: note = strain Sb3-1
MTRLPLHPALSGKTVVVTGGSGVLCSSMAKELARQGAKVAILNRTADKGELIAKEICESGGESIAVACDVTDVESVKQAEERVRLLLGPCDILINGAGGNHPSANTSLETFHPEDLNQPGITTFFDLSVPGFRNVLDLNFIGTLIPTQIFSKSMIGRPGAVVLNISSMSASSPMTKVPAYSAAKAAINNFTQWLAVHLAESGIRVNAIAPGFFLTEQNRQLLTNEDGSLTERSAKIIAHTPMRRFGEPEDLLGTLLWLVDETASGFVTGAVIPIDGGFMAYSGV

SEQ ID NO: 258 - protein, 217 aa, Paenibacillus polymyxa
  REGION 1..217: note = strain Sb3-1
MFTKEEIKQLLKNDILSMILKPGTLLSETTLSERFQLSRTPLRDVLKQLALESYIDIYPKKGNVVSYIDLESVEQMSYLRSAVEKEIMKELSTQFALSDIQKLSEILDRQRAVIDEDHATDQFLILDDQFHQTMFQLVGREFLWQLIQQSNVHYIRYRKLHMLQAGKLMEIWHEHQTMLEYMLNQETSKMDDLVHHHLRKDIHSLEFLRQFADYIKK

SEQ ID NO: 259 - protein, 359 aa, Paenibacillus polymyxa
  REGION 1..359: note = strain Sb3-1
MNMTWRWYGEGNDNITLDHIRQIPGVMGIVWSLHDKVAGEVWEMERIEKVAEQITSKGFSTAVVESVNVHDDIKIGLPSRDQYIDIYIDTIRKLAKVGVKVICYNFMPIFDWTRTELYKELPDGSNALFYEKAAITDNPRQMVDRILKGAGKFTMPGWEPERLARLDELFAAYAEVTEDKLFDNLKYFLERIIPVCEEVDIKMAIHPDDPAWPIFGLPRIVRSRETIRRILDAVNSPYNGLTFCTGSLGTNLENDLPAMIREFHDRIHFAHIRNVKVFENGDFIEVSHRGKDGSVDVPEVVRAYYENGYQGYVRPDHGRHLWGEEKNCRPGYGLYDRALGVMYLLGVWDSLAQNNKGVN

SEQ ID NO: 260 - protein, 535 aa, Paenibacillus polymyxa; identical to SEQ ID NO: 157
  REGION 1..535: note = strain Sb3-1

SEQ ID NO: 261 - protein, 402 aa, Paenibacillus polymyxa
  REGION 1..402: note = strain Sb3-1
MKRLFALSCAFYLLIGVTSVVLGALLPTLLPHYGRGYSDGGLLLFLQFFGFLVGVLLTPFMALHMGRKSMLAIALGSIVIACTILGVLPSWNWVIVMAICIGFGSGIIESSIGAFTIEFTEEQKAVAMSKLDVYFALGALLMPAIVSLYIWFGIWNLTFYTISFLTFILLLFWLTMPVSASTHLTQADIRTTERSVEQARYSGQHRVLLGIFIIFFFVYMGLELGLMNFLPSILTETLQLQGSVASLGVSVLWIAMIIGRMFSGKIAESAGYIPYLLWSAIGTFCFLVAMVFISSQWVTYLLIFGAGIFMSGLFCIALVYANVMIPGMTERTTSILIASGGIGGSVLQYVIGWSMSEWPVAASLWILGGFTLILLLALILTYLWNNRGSRVVDSLAHQSKEG

SEQ ID NO: 262 - protein, 412 aa, Paenibacillus polymyxa
  REGION 1..412: note = strain Sb3-1
MHTLTKERFRYGKGITLIDDSGKEYLDGVSGTFNLSLGYNHPHVVAKVQEQVGNLAHMSSSFTEPYVEEVLDHLIQYAPNGIDAGWMRDITGSTANECAVKLAQKYTGATDIISLHLSHHGQTQFATGISGNAFRRKNFPNSTAANSLHVPAPYCYRCPFNSSPDKCGHHCIDAISDAIEYASSGSVACMIIEPILGNGGNIIPPPGYFKRLRQLCDEHGMILIADEVQTGIGRTGYMFASELFDIQPDIITLAKGLGGIGVPVAAVLMQSRLDVLEKHEHSFTSGSNLISVTAAKSTLEVVTEPGFLEAVRSKGDLLGSLLTEMADKHDCIGEARGVGLMWGLEIVDEDDAPNAVKSNGIIDRAFEEQQLILRGSRYGYGNVVKVRPSLTATEDEIVEIVKRLDAVLSTLH

SEQ ID NO: 263 - protein, 349 aa, Paenibacillus polymyxa
  REGION 1..349: note = strain Sb3-1
MLALVYKSAWDVALEERPIPEIKKDNDVLVRIRATGVCGTDLGIISGKYHAVPSTILGHESAGDVVAVGSAVSSLKPGDRVVIDPTYYCGQCEMCRTGRQNHCTHKSVTETGVSADGTFTDYYVTEDRFLYKLKDHISYEEATLTEPLSCMLTGINQINLLPNFTTVIIGAGPIGILYSYALASKGVTGCLVDISEERLAIADSIAPERWSAHATLEAAIHKLAPEKNQVDMIVDTTGVVGTEVLSQLASGGYLMLVGLRDGVSSFNPKEVVDRSLKIIGSIDSLGTFSTAHYLIEQQIIPAKKIITHSYPLDDFHEAFKTLGCNISERTLQPSSQAIKIVLQSNGSGN

SEQ ID NO: 264 - protein, 242 aa, Paenibacillus polymyxa
  REGION 1..242: note = strain Sb3-1
MTSIHHVTPTNHECTGDLSASVPVKAVIFDMDGVLVDSEPIYFEVERSSFAHFGAPMTEEEHHTYVGVTLESMWRQVLDRHQLTNTLEEALAYHRKNVMQTITAYEGLMAIDGLERWLDWLREKGIPIAVASSSPRSLIDLIMEKTGLGRYFDIRITGEEVSQGKPAPDIFLYAAELLGIAPDHCIVIEDSRNGVHAAKSAGMRCIGLHNPGSGQQDLSKADHRISSYDDLWALKESLPFGE

SEQ ID NO: 265 - protein, 203 aa, Paenibacillus polymyxa; identical to SEQ ID NO: 152
  REGION 1..203: note = strain Sb3-1

SEQ ID NO: 266 - protein, 184 aa, Paenibacillus polymyxa
  REGION 1..184: note = strain Sb3-1
MNILIREVKAEDGECSTNIDGSFIVDSTLVLQLTGQQIEYKVKERPISKKSYDDDQFEEDTVEDYSNYIDNPDQIIYLALVNNQVVGQIVLKRNWNKYAYVEDIKVDKLYRSFGIGKELIEQAKRWGKDGRMPGIMLETQSNNVRACKFYESCGFVIGGFDSYVYRGLDKESDEIAIYWYLMFD

SEQ ID NO: 267 - protein, 309 aa, Paenibacillus polymyxa
  REGION 1..309: note = strain Sb3-1
MKIGVIMGGTSTEREVSLQTGQEMLNHLDRSRYEVVPIVIDQPADLIAQVQHTDIDFALLALHGQYGEDGTVQGALETLGIPYTGSGVLASSLCMNKQLSKMLLKSAGVLTPAGLCWQGMGDYDQQAVEQLGYPVIVKPNMGGSSIGIQLVHNEKELHSAIQKACALDQTILVEPFIQGTELTCSIVDGEVLPIIRIRSAHSEWFDYKAKYETGGAEEKVIQLPPVIEQRVRETALASYRLLQCKVYARIDMILCQDVPYVLEVNTLPGMTANSLLPKSAAAAGITFTQLLDRIITSSLHERKREWEKV

SEQ ID NO: 268 - protein, 503 aa, Paenibacillus polymyxa
  REGION 1..503: note = strain Sb3-1
MFQDFKLVGDRPVAIQVKEYIKRLIIKGTFHKDQKLPSTREMSSVLKVSRNTVIAAYEDLEDDGFTYTIPSRGSYVAAMVDCLVADNGGADASFAWQIDWKTRMSKYAVSAAELDMMKQGIRAPRGIISFTSIAPDEQLFDLGNVRRAFMDRMAIEGQVLLNYGYAKGYKPLIDYLMRYMENKGVDISGKDLLITSGFTEGFDIVLSALRPSARRGTVICENPTHHTAIKNLKLQGFKITGIPMERDGINVEQLEAVLQKQTNSFDLAYLTPSYHNPTGIVMSPAKRSAVMNLMMRYQIPVIEDGFNEELRYSGAHIAPLIATAGRGNGVIYIGSFSKVLFPGLRVGWVLGDRALIDTLESIKRARTIHTSTIDQSILYQYLLNGNFEKYVKRARMEYKRKYELTKACCDTHLSEAQLSGDGGLHVFLTFPAGVNTRQLLEACIDQGVIYTPGDKFFIQEGEGTNTLRLGFSRVTDEQIERGIQIIGQQVRNFHKACGHKNNP

SEQ ID NO: 269 - protein, 95 aa, Paenibacillus polymyxa
  REGION 1..95: note = strain Sb3-1
MLDQFLTDYTSRQTDEYGGSIENRIPVIANGQLDDPDKAATIIGQGFADVIALEKGVLANYDWIKKVRNGKPLSELDQNKVLRPDATIKDFEISQ

SEQ ID NO: 270 - protein, 273 aa, Paenibacillus polymyxa
  REGION 1..273: note = strain Sb3-1
MDICYCYHGKQVCEPSYSWGPGIKGQYKIMFIHAGRGVYQIDGKTFHLQQGEGFIVYDNILCYMEADPTDPWIYSWIAFSGNGVIPLFEQAHISPLHPVFRYSPLFWFDFYLDEFSACDVNHSTSELRRQSILFRLLADWIDMLVATSQLLPEIRPKDAYIRKAVEFIRMNYNQRVSISEVAHIVGIDRVYLSVLFKEILNVSPQQYLLNLRMDKAGDLLDNSQLSITEVSYSVGYSDPLLFSKMFKKVKGLSPSHFRARLKRDSSMGLSSLD

SEQ ID NO: 271 - protein, 334 aa, Paenibacillus polymyxa
  REGION 1..334: note = strain Sb3-1
MTYIAQENRYEQMKYRRIGRSGVRLPAISLGLWQNFGGDKPFEDSRAMILRAFDLGVSHFDLANNYGPPPGSAEETFGHVLKKDLAPYRDELFISTKAGYYMWPGPYGEWGSRKNLLASLDRSLQRMGLDYVDVFYHHRPDGDTPLEESMGALAHAVKTGKALYVGLSNYGPEETKQAAAILKNLGTPLLVHQPMYSMLNRWIENGLQDVLTEVGAGTVAFCPLGRGQLTGKYIDKLEAEFKTGLRTLKLEAISQERINKFRALEAIAKRRGQTLPQIALTWALREGGVDSVLIGASRVGQIEENVQAVHAEPLSAADLQEIDQVMHNIGDVPW

SEQ ID NO: 272 - protein, 493 aa, Paenibacillus polymyxa
  REGION 1..493: note = strain Sb3-1
MKMSFNSFTKPLIMILLFSLLTLLFQAALPATPASAAACANPVSYFGEMKASGNKINGSKTNRPMMVKGSSFFWSNWSGPFWNTATVNRMVDEFQVEIVRAAYGVDPSGNPYNTADESKVRDVVNAAIAKGIYVIIDWHSHDAHNNVNAAKSFFSRMAQEYGSYDNVIFEIYNEPTQVSWGTIKSYAEQVIPAIRQHSDNLIVVGTPFWSQNVDQAANDPITSSSNIAYTLHFYAGTHFQSLRDKANYAMSKGIPLFVTEMGFVNADGDGGINYDSTNQWLDWMNQNNLSWANWAINDKTEGASIFNTNGSLTAGGNYLKSILAGHAPYAEWRQNAACGGSSANTLYDFEGSTQGWTGSNISDGPWSVNVWSSKGSNSLKADIIMSANSQHHLLLSQSRNLSGKATLSATVKHASWDSAGDGLNAKIYAKTGSGWAWYAGKAVKINSSGGTTLSFNLASVPNLDDVREIGIQFLASANSSGKSAVYVDNVTLQ

SEQ ID NO: 273 - protein, 334 aa, Paenibacillus polymyxa
  REGION 1..334: note = strain Sb3-1
MASIHEVAKQAGVSVATVSKVINNYSDVSSKTRNKVNKAIELLNYQPNVVARSLVKKRSWTVGMFLLDFFTNPFISELLDGLRKSLEDSGYDLLFLSPNLSNPDYTFTKHCISRNVDGVVMFGVDRTNQNFLDLLQAEMPTMMIDTDLLGPRTGYVTADNRRGAYLGVQHLVELGHKRIAFISGDLGCLVGQTRFSGYQEGLRSNDLPYYDQYVEVEKYSIEGGYKAMKRLLQLPEAPSGVICSSDYMATGAIEAIREIGMRVPDHISVVGFDNTFYAELSMPKLTTINQNITLMGMKAGEHLIRMIENPDYSPPTEIVPANLVVRDSTGEYKE

SEQ ID NO: 274 - protein, 460 aa, Paenibacillus polymyxa
  REGION 1..460: note = strain Sb3-1
MEKSIEKRIPKSLIWLCVLAFFSVLNETVFNVSLPDIAAQFGIKPSAANYVNTSFILSFAVGTAVYGKISDIYGVKKLVLISMMIYSGGSLIGLLFHAWFPILLVARFIQGAGASAVPGLIMVIVTKSIEKQHQGKAFGMIGSTVALGEGFGPIVGGWIADYVHWSYLFFLPMMTLVTLPFFLRTLPDEPMKKGGLDVLGGLLFVLGIVSFTLFTTHYEWWYLTNSVILFIGFVLRIRRAKEPFVEPALFKRRRFIVGVFVGGILLGTVAGFMSMIPYMMREVHQMSTSLIGGGVLFPGTLSVILFGIVGGSLVDRQGARFVMVAGLLLLVMGLFIVSLFADRSLWIISGALVLIFGGLSFVKTVISTIVAGSLSADESGSGMGFLNFSCFLAEGIGIAIVGGLLTQLRCNFPILPIVTDVAAYLYSNLTLLLLAVVITGGAIFMIVFKGEEASLDINRN

SEQ ID NO: 275 - protein, 292 aa, Paenibacillus polymyxa
  REGION 1..292: note = strain Sb3-1
MELLQLQYFLTVARLEHVTEAARSLHVTQSSLSKTIQRLEEDLGVPLFDRTGRKLRLNEFGSRFLYRAERALFELEQGKQELSDLSSPEHGTLELAVTTASTLPGILREFRRKRPYIQFHVQMLTTQEMVTLLHRGEVDFCLSSPPVEGDDIECKIVCIDPILVAVPKGHRLADRNSVSLTELREEWFVGVKRGYGTRDLVDSVCMSEGFVPNYVYEGDEPARLSTLVEAEIGIAFIPSTARNSQEHLKYLQVENHELIREIALLWNRNRYISRAAQEFREIVVEYFATNSK

SEQ ID NO: 276 - protein, 461 aa, Paenibacillus polymyxa
  REGION 1..461: note = strain Sb3-1
MSVRSWWLMISVGLGILLNPLNSSMVSVAIPSLQNVFQLDFTGVSWIIFSFYIASSIAQPIMGKASDLFGRRKMFLIGLVVAFIASLLAPLSPTFGWLIVFRIVQSIGTSMMVGVGMAIVRIHITEKQATALSVLSIFLSGAAAIGPFIGGVLVHWWNWPAIFFINIPFVVASFLLAWRTIPKDESPTSVARNMCFRKWFDLIDARGILLFTLGLVALLVGLLSAKSSGHISLENVIVGLIGLVALGAFVRYELKATSPFIPLRTFAKYPALTWVNVEFMFVNVLYYSLFFGLPSYLQVVRHVSEFQTGILMLSLGLCSLAASPIAGRWIDKSGPRPALLVSAILMTLGSVWLVTLNPTSPVISVCLALAAFGISNGLNNVGMQAALFQSSPKEIIGVASGLFNTSRYLGTIFSSLLIGIVMGGKFSFEGFQVLGIVLTVIALTLVFMSRRRLDSGQLRES

SEQ ID NO: 277 - protein, 264 aa, Paenibacillus polymyxa
  REGION 1..264: note = strain Sb3-1
MDMGLNNKTALITGSTKGIGKAIAIELAKEGVNVLINGRNYDEVEQTVNEIKSKFPTTSPQNATADIVDKEQRKALFEKYPEVDILVNNMGIYEIMQYEDVDDEVWEKYFRTNVLAANGLAKFYLSKMLKNDYGRIVFIASEEAIMPSGQMPQYCMTKSMLLSLSKSLSKLTRDTEVTVNTIMPGPTLSEKVHQIIEGIYTNENMTFSEKEKQFMAANLPQSEIQRFIRPIEIGRLAAFVCSPYASAFKGSPIRMDGGMVPTIF

SEQ ID NO: 278 - protein, 350 aa, Paenibacillus polymyxa
  REGION 1..350: note = strain Sb3-1
MKKTHTSDHIKIPPGFWTGLHELGISAHVVAHKARLPLNIMTEPVVTPAQYFAIWQAYSDLIGDTAKGIIKLATVFDTTKYPPTVLASYHARNYRDALNRMARYKQLCPPETLRITEEGEHCTIELEWLYTEQPGPPMLVGITLACLLELGRRGTGQPLTAQLVEFSQSMGDVQALEAYFGCRIRIDAKCNRMTLHRRDLDLLFVSYNEELLEILTPVLDRSLAEQQRNCSITEMVKWIIKRSLTGGRPDIEAIAKELNMSDRTLQRRLTDQNTNFKHLLTQARHEQARKYLADPSLDIKEVSFLIGYEDQNSFYRAFRLWEGDTPLNWRTKHLAANSISEGQLGRPSIH

SEQ ID NO: 279 - protein, 340 aa, Paenibacillus polymyxa; identical to SEQ ID NO: 138
  REGION 1..340: note = strain Sb3-1

SEQ ID NO: 280 - protein, 142 aa, Paenibacillus polymyxa
  REGION 1..142: note = strain Sb3-1
MHNNNTIELLNIWLSLTKLQSNINDELERALQENYSLSLNEFLVLYFLSQTEEKKLRLQHLQEMVGLSQSALSRLVVRMEAKSCGALQRHICEDDRRGIYTSMTDFGEKKFDRALETFNQILESVLSKDDLKQKLQSLIEKI

SEQ ID NO: 281 - protein, 87 aa, Paenibacillus polymyxa; identical to SEQ ID NO: 136
  REGION 1..87: note = strain Sb3-1

SEQ ID NO: 282 - protein, 172 aa, Paenibacillus polymyxa
  REGION 1..172: note = strain Sb3-1
MGILSGNPKDEPMHYGEISGVWQFSLAAKGALSFYQAFLNHAGDKDLRKILDALIDQAKLEIKECDTLLTDNGIAPAPALPERPPVKLEDIPVGARFTDPEIAAKIASDTSLGLVACSQVMGQSIREDIGALFAKYHATKTALGVKILQMSKEKGWLIPPPLQVKRPEAVEV

SEQ ID NO: 283 - protein, 354 aa, Paenibacillus polymyxa
  REGION 1..354: note = strain Sb3-1
MKMDNRKYNVVIIGYGGMGSYHVQLIEPIEQLAIGGVYDIVDYRMELAAAAGYKTYASLEAVLGDQDVDIVLIATPNDVHKEIAIQALQAGKHVICEKPVTITSADFLEIVEVAKQENRLFTVHQNRRWDEDFRIVKDIISKKTVGDLFHLESRVQGANGIPGDWRQLKAYGGGMLLDWGVHLLDQLLQITDSQIESVTATLSYILGTEVDDGFTSLIEFKGGLTAVIEVGTTNYVKLPRWYIKGTEGTAVIKDWDLSGEIVTRNPDVAHVEPKPIQAGQGLTKTMAPPSEESTLKFPIEKIPAAAESFYENFVSTIEGKAELAIKSEEVHRVLVLIETIFEAAATKSVIRRSI

SEQ ID NO: 284 - protein, 533 aa, Paenibacillus polymyxa
  REGION 1..533: note = strain Sb3-1
MTRNKRLRKWSTILLTVPMLTMFASSAMAEQDMNGHKPPNSAGSGVFYEIYINSFYDSNGDGHGDLKGITQKLDYLNDGNPRSGKDLQVSGLWLMPMNPSPSYHKYDVTDYYQVDPQYGNLNDFRTLTKEAKRKGVKVIIDLVINHSSSEHPWFKEASANPQSKYHDYYVWADENTNLDEKGSWGQQVWHKNPNGEGYFYGTFWSGMPDLNFDNPEVRKEMIKVGKYWLQQGADGFRLDAAMHIFKGQTKDGADKNIAWWNEFRSEMEKINPNVYLAGEVWDKPETIAPYYESLHSLFNFDLGGTILNSVKNGQDQGIATFAEKTLKLYKSYNRAALDAPFLSNHDQTRVMSELGGDVRKAKLAASILLTLPGQPFLYYGEEIGMKGEKPDEFLREPMRWYKGEGLGQTKWEEPKYNKGEVSVEAQLRDNDSLLASYRTLIRLREEHEALRSDNLEPFQAGSANVAAYKRSSGKETLYVYHNLSGESVTLQMKDRDKQKRKVVFSSSKDVKVKKDTVKIPAYSSLITKEDRKS

SEQ ID NO: 285 - protein, 280 aa, Paenibacillus polymyxa; identical to SEQ ID NO: 132
  REGION 1..280: note = strain Sb3-1

SEQ ID NO: 286 - protein, 292 aa, Paenibacillus polymyxa
  REGION 1..292: note = strain Sb3-1
MNKYLGNKPALALFLLPALILYSVILIYPVLQTVLRSFYDWDGLSTLTFSGLNNYRELFSDPLLGTSLKNGLIFAIVLAVFQIGLGTILALICADPRTRGRKILKTAYFIPVVLSVTVVCQLWIAIYDPTNGLINRLFELLNIPYQQNWLSSPTTSIIAIAFVNAWQFMGYQFSLLYAGVKSIPEDYFEAATIDGCSKWKAHLHVTLPLMRETYKFCFIIAITSGIGAFVQMLIMTNGGPGTTNYTMTFMIYRYAFMESNYGYACAVSVLLVLISLLATVVINKLFDRGQTA

SEQ ID NO: 287 - protein, 433 aa, Paenibacillus polymyxa
  REGION 1..433: note = strain Sb3-1
MKKNLKIWSAALLVLTMSVGLVACGEDNSASSNNGSGDGTIKLKVYAQHFDDDTIKPFDYAVAELKKKMPNVEIELDPAVQDGGQKLKTYAATGNMPDVYLADWSVLQTFAKSKNVEVLDNYDTTAEFKKSLNPGVESRLVAPDNHVYAYPETGIEFQMIYYNKSIFEKVGIKTPLKTIDQMADAAKKLKAAGYVPMSIFAKEKWITTAFYNGLVTREQPRGFGALEEKGVKALPEAFVTAAQQMKQLQRAGLFDANATNTNYDQASSLFYQGKAAMFVNGQWEIYSSQEKLGDQVDWMYWPAKDEATYEKSKYFIDGSGSPQGYAVSANSKNKETAVKVAAFLASKSAEYRYTQLGSPIVPVKVDKPMASNVPAMMQRVVKELLPNAQEYAQLLSNTKIQNTINDNTQNMMVDNFSENDFVSNLNSTLNKEN

SEQ ID NO: 288 - protein, 368 aa, Paenibacillus polymyxa
  REGION 1..368: note = strain Sb3-1
MYKVMIVDDEPLFRDFLRIKIDWESHGFRVCCEARNGQEALQEAERHQPHLALVDINMPFIDGIELAERLKVKFERIVIVFISGHNEFEYLQKAVRTGVQDYLLKPFNAEEMLSMLERIKAKLPVLPQESESAELRGQDGEVLHSRAGMPDLGHLRDAVVLDLRMKDSETLEEVRKAIRQLSKYKWGDEYADAMLMGIVSLALSFASERGIPYDQLWENGGDKSPYERLRELDSWEAAEGWMLALYRKLILLMENMRPTKASNLFAAAINYIEEHYADAELSAEQVSCGVFVDPSYLRRVFRKESGFSIVDHITHIRMKKAKELLLKGNRKLSEIAESVGYSDPNYFSKCFKKRFGMTPTEYEQLKKR

SEQ ID NO: 289 - protein, 602 aa, Paenibacillus polymyxa
  REGION 1..602: note = strain Sb3-1
MNILSLARKWFGRLRFKSKVIAVFLPLIIISLLILGLVSNQLFSRSLIEQTTSNVVDESQLILSRTDYIFSSVETAANIMVTNINRMYDSYGARPDTAMDRVQFGNLMQSRLSIDLSIFREVDAAVFIDTEGTIFASYTESGDDSKVDSMLKRVRESESYGQALWFDMEKRDFLTPDPNSPVLTLGKMVINIDTGDPYGTLFLLVKEEGLSDYFRSSDPDTNKSYYFLDNEMRVAVAEDNGMLMKPVSSQLAEAIQGCGSNVSPKTCSFEDGGNLVTVNDYNRMGWKLVNIVSLSLLTADVRQNVRLSLLIGVFCLAFSWLGASFLSKMVVSPLEQLTRAMRKVVAGDLQSVAIVRTEDEIGTIAEAFNFMIRRIRELLDEVRQEQNRKREYELALMTAQIKPHFLYNTLDTIYALNELDRNDEARDTTKALADFYRMVLNKGRELIILEKEAQITDDYLTILQIRYPDVFRYEVDIPPELAGTPIPKLSLQPLVENSIYHGLKKKGTKGFIRIFAFTQNDRVIVRVEDNGVGMDEIQVQNIMSRHLPKEGIRSIGTYSVQQRLSLYFGEEYGISVQSVLGEGTIVDLSLPTQPKGSVHQDV

SEQ ID NO: 290 - protein, 332 aa, Paenibacillus polymyxa
  REGION 1..332: note = strain Sb3-1
MATIKDIAREAGVSAATVSRVLNNDLSLSVSPDTKNRIFLIAEQLGYKPSRLRQLKRNTERAGKTVALLLWCSIEEERDDPYYASIRRGIELRCEELGLTLGQTLRGRSSLGTLQKADGLIVVGGVDPEEVSKLYPDKNTIVLVDQYHEQLEYDSVRLHFRQAVDQALGHLLELGHRQIGFIGGKSDGERRAHYFERFMRERGLYNPQFVRVGAWSTADGYLMMNELLAEQERPTACFAASDPLAIGALRALHGHGVKVPEDMAVVGFDDIEMAAFVQPPLTTVRAYPEQMGKAAVQLLSERFEGREPPAYNVIGTKLVIRESSCLNSKINT

SEQ ID NO: 291 - protein, 757 aa, Paenibacillus polymyxa
  REGION 1..757: note = strain Sb3-1
MNIHVNEALGLFHLQSKDCSYIIQLVEGYPAHVYWGAQLHHDQSLASILELRERCSFSPTPDSSSRTLSLDTLPQEYPQYGTSDFRQPAYQVALADGTRTTELKYSGYRIEPGKPKLEGLPSVYTESDDEATTLLLFLEDQHSGLKTTLLYTVFANHSAIARSTLFEHKGSAVMNIEHAMSASVDFADSNYQALYLSGAWVRERHIQRRDLGPGAIRLESRRGSSSHQMNPFLALLRPDATEDRGDVYGFSLIYSSNFVAQAEVEQFNQTRVSIGINPFDFSWRLEPGQSFQTPEAVLVFSEEGLGGMSRIYHRLYRTRLCRGTYRDKERPILVNNWEATYFDFDADKIEAIAKEAGPLGIELFVLDDGWFGKRDSDNSSLGDWFEDRRKLPGGLTDLAKRVNEQGLQFGLWVEPEMVSPDSELYRTHPDWCLHAEGRRRTEGRSQLVLDLSRKEVCDYLYETLSSVFSIAPITYVKWDMNRNMTEIASATATSERQKEIAHRYMLGLYDLLERLTSRFPDILFESCSGGGGRFDPGMLYYMPQTWTSDDTDAIERLAIQYGTSIVYPASTMGAHVSNVPNHQVGRNTSLAIRGDVAMSGNFGYELDLTAFTNEEKELAARQIAQYKEIRSLVQQGDMYRLLSPFEGRGDTAWMFVSEDQSEAFVAYFRVLAEPNGPIRRLTLKGLDPDKKYVIETGATGNTSDSINTSAVDGVSPFRVAFDGEIFGGDRLMKIGLVVSDLTGDFASSTFRLKAISC

SEQ ID NO: 292 - protein, 240 aa, Paenibacillus polymyxa
  REGION 1..240: note = strain Sb3-1
MKYEIILFDVDDTLFDFKMAESHALHNTFAQFGLPQGATEYKSSYDEINSSLWREAEEGLITSAQLRVERFKRLFTVHKLDFNPDAFSAAYLRYLGEGAFLMDGAVELCDVLSECRLAIITNGIKEVQTSRIQLSPLRHVFEQIIISEEVGYQKPQAEIFDYAFTKLAISDKSKVLMVGDSLTSDIQGGNKYGIDTCWFNPSGKTNTSGIQPTYEIKSLMELLSSVLSMPSVLNHTSLEY

SEQ ID NO: 293 - protein, 283 aa, Paenibacillus polymyxa
  REGION 1..283: note = strain Sb3-1
MSTYQMVISDGFELKYTIRGNGKPILVIGSSVYYPRLFSDHLYKKFRFIFLDHRGFAKPTRALKPEDYTLDKVINDIETARQCLHIDTFIILGHSGHAFMALEYAKQFPGYVEKVVLLNSAPTNSQERQRQSFSFFYETASPERKDRFEKEIALLENDIKREPDRRFVHMCIRMGAQSFYDYTYDAAYMWNDVHTNMPIIDYLWGEAFGKMDLIQSLADVDKPVFIGLGRSDYLVAPVSLWDRVDDSYTNVKKVVFEHSGHNPMFEEPHYFDQTLTEWINENH

SEQ ID NO: 294 - protein, 386 aa, Paenibacillus polymyxa
  REGION 1..386: note = strain Sb3-1
MSFSDDQLICFGFEDKLGYFAKAAVPPIYETAPFFFDTYEDYAEAANHEKEHYVYSRGTNPTVRIAEQMIAALEGGEDCKCFASGMAAISAALMCSLSAGDHLILVGHIYETSVSLAKYLTKFDINYTIVHSTSTEAVANAIQPQTRAILMESPTSFTFDMVNIQEVASLSKAKGIRTIIDNSWATPLFQKPLEWGVDIVVHSASKYLGGHNDLIAGAVIASKEIINRMYAEEYELIGGSLAPFEAWLLIRGLRTLPLRMEAHQRNALLVARFLSDHPAISKVNHPGLPSHPQHELACRQLKGYAGLFSFELKDSGYEDICRVINKLRLIRIGVSWGSMESQVISPNYGFNKQSLKKQHMPKSLIRLAVGHEPAELLIEDLATALS

SEQ ID NO: 295 - protein, 539 aa, Paenibacillus polymyxa
  REGION 1..539: note = strain Sb3-1
MLTRWIRSVLKPGKRYTQDIEKSKQQTATDPIHSSLSHTLSLLKLKLGQGPDFVIRDFSESPVHAGHLAVCYIEGLIDQNLLSDLMESLIKEMGSADTFMFKENTAASLLKNTIPSGNIQMIHSQNEVYQAILSGNAVIVIDGNNYALVVSIAGGVRRAIQEPSTQTVVRGPKEGFTEDISTNITLIRRKLRTPDLKFESHVIGRYTQTKVMLAYIENVANPEVIQEITKRLQSIDTDSILESGYIEEFIQDEPLSLFPTMLNSERPDTVAGSLLDGQVAVLVDGTPFALIAPVTFFNFFQTAEDYYQRYDISTFLRALRVVSFLVSLLLPSLFIALTTFQQEMIPTTLLITLMAQREGTPFPALLEALMMELMFEVIREAGVRMPRVIGPAVSIVGALVIGQAAVQAGLVSGAMVIVVAFTAISNFVIPYFAMASAVRLLRFALMLLAGALGLFGILIGIIPLLIHLVSLKSFGVDYFVPYSPTFKTNMKDLIIRVPWWAMKTRPSEKSGHNQTRQAAHQYPASSDDTEGGHKPDTQK

SEQ ID NO: 296 - protein, 399 aa, Paenibacillus polymyxa; identical to SEQ ID NO: 118
  REGION 1..399: note = strain Sb3-1

SEQ ID NO: 297 - protein, 368 aa, Paenibacillus polymyxa; identical to SEQ ID NO: 117
  REGION 1..368: note = strain Sb3-1

SEQ ID NO: 298 - protein, 228 aa, Paenibacillus polymyxa
  REGION 1..228: note = strain Sb3-1
MEVFVTIGVKLIISFFGLWLITFITGRKTLSQLTPLDFLTSLVLSEIVGNTLYDDKVTIWHLLFALALWCALAYFFEKATTHFVKFGYMAEGRTVLLVDKGQVNQELLEKYDIEFTQLLSMLRQQNIFSLREVLYATLETNGSLSVMRKPEYEPPAAQDMGIDAQPDLFSVTVIDKGRLLNESMRGKTIDVELIKAKTREQGYDSIDEIAYAELSEDGTLHIVPMKEK

SEQ ID NO: 299 - protein, 88 aa, Paenibacillus polymyxa; identical to SEQ ID NO: 115
  REGION 1..88: note = strain Sb3-1

SEQ ID NO: 300 - protein, 158 aa, Paenibacillus polymyxa
  REGION 1..158: note = strain Sb3-1
MSTAKTTIILFSGELDKALAAFIIANGAAAYDHKVTIFFTFWGLNILRKDELMRTHKGMLEKAFGWIMPRGPKKLALSKMNFVGLGPQMIKHVMKKHNALSLPELIELAQEQGIKLVACTMTMDLLGLQQEELIDSVEYAGVAAYLGDASQGQVNLFI

SEQ ID NO: 301 - protein, 196 aa, Paenibacillus polymyxa
  REGION 1..196: note = strain Sb3-1
MSSTSHIEADQILDCKGLACPMPIVKTKKAMDELLAGQIMEVQVTDKGSLADFQSWAQGTGHQYLGTFQEGVVMRHYLRKANPTDVKEEQAFPSTISHKELQAKWSAKENFILLDVREPAEFALKHIPGSKHIPLGELENRLAELNLEDEIAVICQAGARSERACRLLADKGAKNVKSVLSGMSGWAGEIMGYDSI

SEQ ID NO: 302 - protein, 175 aa, Paenibacillus polymyxa
  REGION 1..175: note = strain Sb3-1
MAKATSTSINRQKEIISAAIEVFAEMGYYRATTAKVAERANISQPYVFRFFATKEALLIEALKVSFARIIDSFHRVIQSASSEQLEQELIAAYSQIMTEYRNEILLQMQAQTIREDVVVTVMQQGLREIHTIVYDAFRQAGIEQALERTMLFLARGMLCNISMSLDLPELMKTDD

SEQ ID NO: 303 - protein, 266 aa, Paenibacillus polymyxa
  REGION 1..266: note = strain Sb3-1
MKPTHQSRNRKKLACKLVTTSALLAIGFAVMTGCGNSGEANSTAPSTTKSATPSASNSTDQNTDIHTNEQDTHTNKTSTDLSKPSVDAGSSKGSSKNTGKEFDQGSTSTQHKPASSTASPDSKYSSAAAILSAAKQGTLPNLPKGLGLGTSSDLLFELWGKSDSGSTGPMRSYAKYHTDLVLDGNDKVTEITSSDSKYKKLLIKQVIDELGQPTETVDTSRDISGTAEANYKINNTSGLSYYLVFSYQTKTQKVSYVRLYFNSMTP

SEQ ID NO: 304 - protein, 208 aa, Paenibacillus polymyxa
  REGION 1..208: note = strain Sb3-1
MEFLRKYWQDAGAIIGVAVCIVLFLNPAMFSDISGILWLSFVNILFHQFEEYRWPGYFAGLFNNILFKSEAPDHYPLNPNSAMIINVAIAYVFYLLPVWFPHVIWLGLAPVLMGFFQVVWHGIVVNLKAKTVYNPGLCTALLLHVPIGIWYIHEIVKRDIPTAIDWIAGTIYFVFAVYIFIIKGNIWLKKSDSPYAFSKQQLGIYDRR

SEQ ID NO: 305 - protein, 196 aa, Paenibacillus polymyxa
  REGION 1..196: note = strain Sb3-1
MSHPDKKQQTKEKILQSTLEFIQKEGFEAVTIRKIADLSSTNISLVNYYFGSKENLLSEAIEVILNSFQHTFSVLDNTAMPPRDRLKQFLLNYLQVIRQYPELLSRIIVMGSTPFTSQQEYGRFLNMMGFPKVQNTIKELTGEQQPERLLAMMLQIFGAIFLPALMSPILESGAVVEMPTIEEQLNLLFERYFDQK

SEQ ID NO: 306 - protein, 410 aa, Paenibacillus polymyxa
  REGION 1..410: note = strain Sb3-1
MNPFESLLEQYAELVVRVGVNIQPGQAMLVTAPLETVEFTRLIVSKAYEAGAKYVQVEFEDDSITRSRFEHGDEASFDYYPAWKAEMMEKFAEEGGATLTIKVPNPDLYQGIDPQKVSRATKAAATAREGFSKYTRNHKISWCLIKAPTKAWADKVFADVAEEDRIRVMWDTIFQMNRVDGSDPIQNWQNHLKNLEQVQDKLNHKKYKSLHYRAPGTDLRIELADGHIWRSGGGENGRGDYFVANMPTEEVFTMPKRTGVDGHITSTMPLNLNGQLVDRITFTFKDGKVTEYTAESGEQHLTHLLATDEGASYLGEVALVPHDSPISNLNRIFYNTGIDENASCHLALGSAYPFNIENGTQMNREELLQNGANVSLTHVDFMIGSAELDIDGELQDGSKEAVFRKGNWAI

SEQ ID NO: 307 - protein, 529 aa, Paenibacillus polymyxa
  REGION 1..529: note = strain Sb3-1
MTDQQQWLAPEYYNMTSEMEHHEAGKTALKWLSETGEYEEITYGELLKKANQLAGGLASLGFNKGDRVLVVVPRRIIAYVIYLACLKLGLAVIPSSEMLRAKDIAYRLRHSEARAVIAWTDVTSEVDKISDDLPALDYRIVVPGDRTVGAQGWLVLDELMEGQEDIFEAVKTHRDDMAILAYTSGTTGNPKGVVHSHGWGYAHLRITSPWLDIQASDIVWATAAPGWQKWIWSPFLSVLGNGATGFVYNGPFRPGRYLQLLQQYGVQVLCCTPTEYRIMAKTAGLDQYDLSRLRSAVSAGEPLNQEVINKFQEQFNIKIRDGYGQTESTLIIGNLRDVPLRTGSMGKSIAPGLVEVVDEDGIPLAPGQVGDIAVRADLPALFHTYYHDPERKLASVHGDYFVTGDRARKDEDGYFWFEGRGDDIIISSGYTIGPFEVEEALMKHDSVQECAAVASPDEVRGHVVKAYIVLKAGIEGSPELVKELQHHVKTWTAPYKYPRKIEFIEELPKTSSGKIRRVELRELEKQSVL

SEQ ID NO: 308 - DNA, 1105 bp, Paenibacillus polymyxa
  source 1..1105: mol_type = genomic DNA
  misc_feature 1..1105: note = strain Sb3-1
atggctgagcccttaaaaaatatgtacacggaggaattccttcgtctattcggtgaaagagtacaggctgcatacagtccattcgacattgaaggatttatccatcaagttatggacaaaaaatgggatgagctagagctaaaagaacgaatacggcgtatttcgttaacattaggagcgtttttgcctagtagttatgaagaagctctttttattttatttgccatagatgagtactgtagcgggtttccgtacttgtttttccccgatttcgtagaggtatatgggcagggagaagagcattgggacctgtccatgaatgcactggagcgatttacatcaaaatcctctgcggagtttgctgtgaggcccttccttctgcgtgaaccagaacggatgatgcggcagatgacgacctgggcggcacaccccagtgaacacgtccgccgtcttgccagcgaaggatgtcgtccacggctgccctggggacaggcgctgcctgtcttcaaacgtgaccctgctccggtattggccgtattggaactactgaaggccgatccatcattatatgtacgtaaaaagtgtagccaacaacctgaacgatattgccaaggaccatcccgatatcgtcatcgcaacggctcaacgttggaagggggcacatcctgacaccgactggattgtgcgccatggctgtcgatccctgattcgcaaatccatccctgaagtgatggccatgttcggctatgcggatgatacggatggggtgccgctagttgcagctgcctctctcaccacagaccctatcgtgttaaagatcggtgatcactgtgagttaagctatgtgcttcagcttcgagaaggtgaatccgtacgagtccgcatcgagtatggcatcgactttgttaaggcgagaggacaggtctcacgtaaactgtttttgctttctgacaaaaccgtctctggaggaacccgtttaacgggtacacgaacacaccggtttgcagacctgacaactcgtcgccattatgcgggagcgcaccgaattgtcctgctcgtaaacgggcaggaagtggcttctacagtgatagacattgagatgtag

SEQ ID NO: 309 - protein, 675 aa, Paenibacillus polymyxa
  REGION 1..675: note = strain Sb3-1
MSNSQSGTTKRRIIAEDLYRFHWVSDPAVHPTSGEIAYVEQCINKERTDYNSAIWLLPFEGEAPIPFTYGPKDETPVWSPDGSQLAFLRSTDGKRQVWIIPARGGEARRLTHVENNVRSLSWSPDGAYISFVAKTAENQSSSTCDVGEQETHLEGRVVNRTKAKSDGYGLWDDTRDHLYVTDVTSGHTVQLTSGAYDVAEPVWSPNGQLILFVARIAEHSKEDTDLRKQNDLFTIAPASSNGNAAAPFKLTHSELQIESAAFSPDGTMIAFYGHDRHAKGATQTRLYTVASSGGTAVCVSETLDAHLGNAGMSDMRSHLHVGPPRFSADGQSLYTLVTIEGNVHVYQFALDGTFKILTQGEREIYQFELTSDEQHIIAASTDVALPGDLFRIAIHSGNEERLTRVNDSLLDEIEISVPESFWTEVEDGRRVQGWVMKPAGFKEGGSYPAILEIHGGPHAMYSNSFFHEFQLLAAQGYAVIYTNPGGSRGYGQSFTNVVLGDYGGRDYTDLLSAVDEAIRQFPLIDPERLGVTGGSYGGFMTNWIVGHTDRFRAAVTQRSISNWLSMYGVSDIGYSFTEDEVGGNPWDDFELLWRQSPLAYVQQINTPLLILHGEQDLRCPIEQGEQLFTALRRLGKPTQFVRFPASSHELSRKGHPQLRVERLQRITDWFVQHKI

SEQ ID NO: 310 - protein, 182 aa, Paenibacillus polymyxa; identical to SEQ ID NO: 104
  REGION 1..182: note = strain Sb3-1

SEQ ID NO: 311 - protein, 167 aa, Paenibacillus polymyxa; identical to SEQ ID NO: 103
  REGION 1..167: note = strain Sb3-1

SEQ ID NO: 312 - protein, 982 aa, Paenibacillus polymyxa
  REGION 1..982: note = strain Sb3-1
MVMSAILVLPLSLGLFQAEPDRASAATPESTRFLQMYKQLKDPASGYFSKEGIPYHSVETLMSEAPDYGHLTTSEAYSYWMWLEVLYGHYTGDWGHLESAWDNMEKYIIPVNEGDGKEEQPTMSNYNPNSPATYAAEYPQPDQYPSRLSGQYGAGKDPLDSELKATYGNNQTYLMHWLLDVDNWYGFGNLLNPSHTATYVNTFQRGEQESVWEAVPHPSQDNHKFGKPNEGFMSLFTKENNAPAQQWRYTNATDADARAVQAMYWAKELGYDNQVYLDKAKKMGDFLRYGMYDKYFQKVGSASNGSPIAGTGKDASLYLMAWYTAWGGGLGQSGNWAWRIGTSHAHQGYQNVVAAYALSDKDSGLIPNSPTAGQDWATSLKRQLEFYTWLQSDEGAIAGGATNSWDGAYKAYPSGTSTFYGMAYTGAPVYQDPPSNNWFGMQAWPVERIAELYYILAKKGDTSSEQFKMAKQVTENWIEWSKSYVFADERPVTDAQGYYLDAQGKRILGGKNPKVATTAAKGEFWLPSNLEWSGKPETWSGFANHKGNANLHVVTKNPGQDAGVLGSYVKVLTFFAAGTKAEKGDYTELGKEAKDLSKALLDAAWGYNDGIGITTKEAREDYYRYFTKEVYIPSGWSGKTGQGNTIPGTDATPSDPAKGGNGTYSSYSDIRPNITKDPQWSYLKDKYTTSWNKQTQKWDKGAPEFTYHRFWSQVDMATAYAEYDRLINGSGPAEPTAPKAPSNVKASAGDAQVTLTWSKATGADSYTVKRSTTSGGPYTTVATVTDATYKDTGVVNETTYYYVTTATNSLGTSPDSAEVSAKPTAAPIPAKGDVIAQYRVGDTNPGDNQIRPLFRVVNKGKEALDLKNVKLRYYYTVDGDKAQEFHCDYAQLGSSNIQGRFVKLDKAVNGADYYLEITFGAGAGSLAAGENTGDIQIRMNKSDWSNYNESDDFSYDATKTSYTDWEKAPLYINDKRVWGLEP

SEQ ID NO: 313 - protein, 122 aa, Paenibacillus polymyxa; identical to SEQ ID NO: 101
  REGION 1..122: note = strain Sb3-1

SEQ ID NO: 314 - protein, 285 aa, Paenibacillus polymyxa
  REGION 1..285: note = strain Sb3-1
MTVGVLAHLFGKLPYRELAAKVGEAGFTHVQLAPWRAISDVDFNKPGKFNPGLASSIAEEFRKHGVSISVLGCYLHFFVQDEELLRENVERFKELIRYAGLLGAPMVAAEVGRNEDGTPYSERDWRVVKEVVRELADEAEKWGVFVGLEAANDHLVGTAAELATFLEEVPSSHIGVVIDPGNLLKTENLARQDEIIREAFQLLGPRIIAAHAKDRRLSSSGEIETVPPGFGDMNYGLYMELLEQYKPGVHIIMEAAQEHEMAQSKRYIEGHRIAAQKAQQVQTKS

SEQ ID NO: 315 - protein, 244 aa, Paenibacillus polymyxa
  REGION 1..244: note = strain Sb3-1
MAPITLFFIPYAGGSASVSFKWKKLLLPQIKLVPLELAGRGIRSGEPLKDSIEEMSEDLLHQISQELVPGDPYAIYGHSMGTMIAFELYYKLVAGGYGKPAHLFVSGGRAPHVPRNVPWLHDLPADQFRTHLRRYGQLSEAIFDNQELYDYFMPVLRADFKAVEMYKYMDKDTPLHCPITALTGLTDNTVILQDAEAWAQHTDQQFRVFTFEGGHFFIHDEVERITNIIKESLELSTVTSRIQN

SEQ ID NO: 316 - protein, 811 aa, Paenibacillus polymyxa
  REGION 1..811: note = strain Sb3-1
MKYGFFDDANQEYVIHTPQTPYPWINYLGNERFFGLISNTGGGYAFYRDARLRRLTRYRYNNIPVDNGGRYFYIYDDGDYWTPGWMPVKRELEQYECRHGLGYTSIMGERRGIRATQLAFVPLSFDGEVHQVKLQNTSLQTKKIKLFSFVEFCLWNAYDDMTNFQRNLNTGEVEIQDSVIYHKTEYRERRNHYAFFSANRPLAGYDTDREAFLGLYNGLDQPQTITAGQASNSIASGWSPIGSHCIEITLEPGEETSCNFVLGYVENPEEEKWESPGIINKKRAHTMIAQFADETDVERALSELRSYWNDLLSKYTLQSHDDKLNRMVNIWNPYQCMVTFNLSRSASYFESGIGRGMGFRDSNQDLLGFVHQIPERARERIIDIASTQFENGGAYHQYQPLTKKGNHEVGGGFNDDPLWLIVGTSAYIKETGDFGILDEQVPFDGNVDRASSLFEHLKRSFYHVVDNLGPHGLPLIGRADWNDCLNLNCFSATPDESYQTTQNLEGRIAESVFIAGLFVYTGPDFIELCKRRGLNEEAATAQAHVDRMRTATLEHGFDGEWFLRAYDHYGNKIGSKDCEEGQIFIEPQGFCVMAGIGVKEGLAHKALDSTRDRLETPYGIVLQHPPYSRYYMNLGEISSYPPGYKENAGIFCHNNPWIMMAEAVIGRGDRAFELYSKIAPAYLEDINDIHRTEPYVYAQMIAGKDAVREGEAKNSWLTGTAAWNFIAITQSILGIQPEWDGLRIDPCIPKSWGEFTVTRVFRGDTYVIHITNPQHVSKGVATVTVDGTVLTNNILPVAGDGTIHQVKVLLG

SEQ ID NO: 317 - protein, 374 aa, Paenibacillus polymyxa
  REGION 1..374: note = strain Sb3-1
MNKTKRLTQTMDYRTKQARWVRKMLLLYWMIITVHFIVQLGSYLFLDYPASPYEFYVGVLIVPTLIMSGSNLLAELAHFKFSRYSFAILFMASTVICWMIIRLNYDIRIIPALCLLPIFSSILFFNRRLIWLSFALQVIVFFLLLAIDGSFRSYLSDFDIVAIPTFLIMSTFLALIIQASGRDLLVDLYKTKRAQQELMISNAIISKMSMTDGLTKLYNHLSFQNFYEKALEYAEQGAIIHLALVDIDNFKKINDTYGHQFGDKILEGISQIITEQITANDIPARYGGEEFAILMFEHTFEEAYQIVENIRREVEKMTFQEKMQIVSVTVSIGLKSYTEDMNKDKDVFFQETDDYLYQAKRSGKNKIVALDHIA

SEQ ID NO: 318 - protein, 172 aa, Paenibacillus polymyxa
  REGION 1..172: note = strain Sb3-1
MSTLVIVVHPDLAESRINKRWMQELKKQSSVTVHNLYEVYPDEQINVAHEQKLLEQHDRIVLQFPFYWYSSPPLLKKWLDKVLTYGWAYGNEGGKLQGKELLIALSAASVEENYQHGGRNRYTIEELLRPFEATGHMIGVKLLPYFVQYGAATLTDEQLEQSALKYAQAVIS

SEQ ID NO: 319 - protein, 420 aa, Paenibacillus polymyxa; identical to SEQ ID NO: 221
  REGION 1..420: note = strain Sb3-1

SEQ ID NO: 320 - protein, 230 aa, Paenibacillus polymyxa; identical to SEQ ID NO: 93
  REGION 1..230: note = strain Sb3-1

SEQ ID NO: 321 - protein, 853 aa, Paenibacillus polymyxa
  REGION 1..853: note = strain Sb3-1
MVRDLLLYTIVILLLVLIFQRQLIRQAITGVFYGLAGILFFYFGISDSTLLTCVLEIGIGLLFMTLFGQALTPTNYTYGQRLLDKNHDLLTLLRVQPGFTFRLEKRGDEFYYMLLDGELLERMGLNLQVNFNKWEHVKRIGDILELSSETLEQLTEYYKQAWFGNRTVFELEFWEYSALITLHPVRDDGFTRYVIGHVLDITEYKASEQKRKEMSESNHAKSIFLAHMSHEIRTPLNGIIGLSKLLSKTQLTDVQKDYLHKLLASSRTLIDILNNVLDFSKIEACKLELERVEFELENMLRHLADTIGTLLEHKEIEVVFITDPELPKSFKGDPLRMEQVLLNLMTNAIKFTDQGHVLLQVKMVGQQDGRVSVTFMVEDTGIGISKTGMDKLFVPFTQVSTSTHRYGGSGLGLAISKQLAEAMGGSVEVKSCLGEYSQFYFNVELDIGDLNVRSTQLEKPNGKALIIAQHKLVSHSLNELLQDLGLQTLTVSSFQEYADAFQKGEHFDFVMIDMGMEGFRELESWRHWFHILDKQMTQVIGLTTVFQLEEVAAEATEHGVDAFLSKPVTRNALLEVLRFSHEQEKSVSVDHHSLEAVATMNLQYEVGVSTQKYQILVAEDNEISQVVITEFLAERGFEVTIVTNGREVIELLERCSWDMVLLDLHMPEMDGFETARHIRRNRAFNRLPVIAFTADAVQTQQEICLRAGINDVLLKPVHKLTATRILNSWIHLAWLQELHGIHAEKAIASMDGKVYIFQFALHKWIQEYQYLDKKVVRKMDNGQLSSALRLIHSLKGGTGNLCATELLAKVIKLERALKRSNETSGGELYPDWREQLSIVQKEINQIKSSIPWI

SEQ ID NO: 322 - protein, 666 aa, Paenibacillus polymyxa
  REGION 1..666: note = strain Sb3-1
MKKFSGEKWKIIRVLSKNFKTKLMVAFIAFLIIPSMIVGALSFESASQQIRNQIEESAEQAIIRTNFIIDSTIEPKLHDAEYFAERLKGNRVETEEQAAKLKELFKQYAALHPEAESIYYGTKDAKLTTYPPKQLPDNYDPRIRPWYDEAIKGNTKTAISSPYLSADSKQMTVTVSRATTDGSGVIGIDLKISGIKETLNNIKVGHEGYAILLDSNHTYIVHPTKVAGAKITDIESRMFQSDTGEYEYEYEGQPKYMNYATNKLTGWKIGGTLYLSEVDEAAQPILFSTLLTIVGCLVIGVIIVYFLIRSIIKPILKLKEQAVNVSAGDLTQDIQVMSKDEIGELGAAFQNMQHNLRSVIQNVGNSADHVALSSNELTISAEQTSAASEQVSQAVQEIASGAEKQTTGLENNSVALDEIAQGITRIAERSTSVADLARRSALQAEEGRKSVEQTGEQMNSIHQSVERSNRMIQTLQARSHEIGEITKVIGDISNQTNLLALNAAIEAARAGDHGKGFAIVADEVRKLAEQSQSSATQIANLIGEIQHETETTVETMDRVTTEVKDGLQISKETIVKLNHAMEGIRETTPQIDDVASIAQQISASVQEIAATASELATIATGNAATSEEVAASSQEQLASMEEISASAQLLSNMAADLKVMVSRFKY

SEQ ID NO: 323 - protein, 691 aa, Paenibacillus polymyxa
  REGION 1..691: note = strain Sb3-1
MSTSSKPNRLAKEKSPYLLQHAYNPVNWFPWSDEAFEIAKSDNKPIFLSIGYSTCHWCHVMERESFEDQEVAEVLNQDYVSIKVDREERPDVDHIYMSICETMTGHGGWPLTIMMTPDQKPFFAGTYLPKEQKFGRVGLLELLDKVGIRWKEQPDELMELSEQVLTEHERQDLLAGYRGELDDQCLNKAFHEYSHTFDHEYGGFGEAPKFPSPHNLSFLLRYAQHTGNQQALEMVEKTLDAMSRGGIYDHVGMGFSRYSVDEKWLVPHFEKMLYDNALLAITYTEAWQVTGKRLYRQITEQIFTYIARDMTDAGGAFYSAEDADSEGEEGRFYVWSDSEIKAVLGDEDASFFNDLYGITPYGNFEGHNIPNLIDINLEAYGNKHDLTEPELEQRVSELKAKLFTAREQRVHPQKDDKILISWNGLMIAALAKAGQAFGDTRYTEQARKAETFLWNHLRREDGRLLARYRDGQAAYLGYVDDYAFYVWGLIELYQATFDVQYLQRALTLNQNMIDLFWDEERDGLFFTGSDSEQLISRPKEIYDGAIPSGNSIAAHNFVRLARLTGETRLEDYAAKQFKAFGGMVAHYPSGHSALLSALLYATGKTSEIVIVGQRNDPQTAQFVQEVQAGFRPNMVVIFKDKGQPEIAEIAPYIHDYDLVDGKPAVYVCEHFACQAPVTHIDDLKAMLDRIE

SEQ ID NO: 324 - protein, 334 aa, Paenibacillus polymyxa
  REGION 1..334: note = strain Sb3-1
MGEQKSRSRHLIDPEIISAVDLIPTTDLTKSTLMESRKNQSQMMQQLDVTQMFPVTLEKRVVPSYFNGPDIQIEIIKPKQSKHNKMPLYYSIHGGGMVLGSPVVDRPANAALAAEHGFCCVSVYYRLAPEHVQPSQLQDCYSGLKWCIEHAEELGIDTEKVAVGGSSAGGGLAAGLALYIRDQKEFEIHHLRLMRPMLDDRTSIAPEHPYAGEFIWTKQSNYFGWKSVLGVEPGSEEVSEYYVPARAKSLAGLPPTYINIGTIDLFIDEALFFAKQLVFDGVLVELHVYPGYHHMSPAFPNAHFSKEGAITSEYALLKALKIFDINSNEYNTKR

SEQ ID NO: 325 - protein, 89 aa, Paenibacillus polymyxa
  REGION 1..89: note = strain Sb3-1
MRYTNATKVLPQKLITEIQKYVQGETLYIPKPKTEYMNWGSLSGGRRLLEQRNTEIRNAFQNRSSIEQLAKEFFLSTETIKKIVYSHKK

SEQ ID NO: 326 - protein, 248 aa, Paenibacillus polymyxa
  REGION 1..248: note = strain Sb3-1
MSPRTKEQNEEIRLRRLAQIRKAAADVFLNKGPLLEIRDVAVQAGLGYGTVYHYYSNKGNLLHDLLWDALERAGGWLETPLEAQRKAPPASASEKTPAGGHFGLAAAADTGNSAAADSQSGSHETAAAAELGPVAAASVRLLQLWAEDHALYLLHKLAGEGFASLPEGRSAPLSAAFRREVLAPLAALLETDRAADGTTASGGNAAEPPYRLQRTEMLLAALVGCASLSLRRGKLHEEARDIVRFLKL

SEQ ID NO: 327 - protein, 248 aa, Paenibacillus polymyxa
  REGION 1..248: note = strain Sb3-1
MIILKSPREIEEMKPASQIVADCYREVVKLIEPGITTREINDFVARHITKLGGKQFTKGYNGFPAETCISVNDVVAHGIPSNQVLMDGDLLKLDIVVEYGGWFGDSCWCYAVGNIQPEAQKLMRVTKECLDLGIARALPGGRLGDITSAIQQHAEANGFSVVRDLLAHGIGRSLHEEPSYEHIGVAGKGTRLKEGMVFTIEPMINEGTFRITIDDDQWTARTADGKLSAQYEHTIAVTQDGPLILTAQ

SEQ ID NO: 328 - protein, 176 aa, Paenibacillus polymyxa
  REGION 1..176: note = strain Sb3-1
MSNFLSEFEERFRAGFLEDLKSILEEVKNEKVYACAFGTDSDFVTLFLAVNTEESLVRHITNMKAQDLCNSKEDEIYYRWGLSEYQYGDTAHLNHISKFLYATDNVLDYKDEMIKIIAKVVKETDDVLFTQFGQSKEDIIFFVSMTDDDMAEELEDQSVIQMTNAKLVNGFLHRYQ

SEQ ID NO: 329 - protein, 236 aa, Paenibacillus polymyxa
  REGION 1..236: note = strain Sb3-1
MIKQKLKIEGIPAILWGGESDKIFIAIHGNMSNKADDVIVIFAEEATAQGYQVISFDLPEHGDRKEETYVCKVQNCVHDLDIIMRYTQKQWHEISIFACSMGAYFSLLAYHHLPLKQCLFLSPVLDMERIIKNMMTWFSVSEDRLKVEKEISTPIGQTLYWDYYCYVKSHPIDTWNKPTAILYGSEDDLCEYDVISTFASRFHCQLKVMERGKHYFHTKEQLQFYRQWLKEHLTAK

SEQ ID NO: 330 - protein, 241 aa, Paenibacillus polymyxa
  REGION 1..241: note = strain Sb3-1
MNIEDSVQMTDNTLDIQNFDELQAVLKSYCLSLTKSNWDAEELVQDTWVKALGKLNKFEHTNPKALLMRIAKNTWIDDIRRKAVYTRILNREQAKVTVPDHGSFEIEIALQSLMNHLSPLQRTVFLLRDVFGYSIRETSDMLETTEGAVKVALHRARKSLGAVQEELLKGELSLPESEKSKTFLRALTAAYQMGDIATLAMLSYQDVIEPEVMISIVNNKLLWSHVSAKQANFDTISMMAA

SEQ ID NO: 331 - protein, 194 aa, Paenibacillus polymyxa
  REGION 1..194: note = strain Sb3-1
MSVYVPYVVEQTAQGERSYDIYSRLLKDRIVFVGATIDDQLANSIIAQLLFLAAEDPEKDIYMYINSPGGSTSAGFAIYDTMQYIKPEVHTICTGFAASFGAILLLAGAKGKRSALPNSEIMIHQPHGGAQGQASDIAISAKRILWTREKATRITSERTGQSFEKVEKDMDRDFYMSAQEALEYGVIDQVITSL

SEQ ID NO: 332 - protein, 68 aa, Paenibacillus polymyxa
  REGION 1..68: note = strain Sb3-1
MLASLQGKEVTIHFIDGTHVCDGILDQIDDKFVKYLTQYQTFVIPITSIRTVSIDIKERQRHRVGFTP

SEQ ID NO: 333 - protein, 231 aa, Paenibacillus polymyxa
  REGION 1..231: note = strain Sb3-1
MEISQGVEMLQLDFRGHRIHPILLWDQEMAVLIDTGFPGQMEDLRVAMEKVGVSFDKLKAVILTHQDVDHIGCLPEILQECGNNIKVYAHELDKPYIQGEIPLFKDSHLENPPKGQVDATLIDGQELPFCGRIRVIHTPGHTPGHTSLYLRQSKTLIAGDSMYSVNGILGGIHVPTTPDMDATRLSLKKYLDLDIASVVCYHGGLSNVHVNDQILGLSGELIYSELKQPRK

SEQ ID NO: 334 - protein, 260 aa, Paenibacillus polymyxa
  REGION 1..260: note = strain Sb3-1
MLRKGLCAVVLLSLLTVLLPAMHTSAAPNSNLVWSDEFNGTSLNRSNWTPEIGTGSGGWGNNELQYYTNRAQNLQVTGGNLVITAQKEAYGGMNYTSARIKTQDLKKFTYGKVEARIKLPSGQGIWPAFWMLGSNISSVGWPKCGEIDIMERVNNNPSVNGTVHWDAGGHADFGRVSGNLDFSQYHVYSIEWDSKYIRWFVDGQQFNEFYIENGTGNTEEFQQPFFILLNLAVGGNWPGAPNNSTQFPSQMLVDYVRVYQ

SEQ ID NO: 335 - protein, 29 aa, Paenibacillus polymyxa
  REGION 1..29: note = strain Sb3-1
KQFRLAKKKRFGASSEQTHPDQLELPLYH

SEQ ID NO: 336 - protein, 46 aa, Paenibacillus polymyxa
  REGION 1..46: note = strain Sb3-1
MSKKNEYNAIEKLAIIQELKAGQSSRVGVTKNITQRYHLSEVATSL

SEQ ID NO: 337 - protein, 500 aa, Paenibacillus polymyxa
  REGION 1..500: note = strain Sb3-1
MRLFELLLLLSNIGLLALTVLLKKGRHRIPVFVASGIATLLLVIHWTVEGYRVQLFFPYCITIIFLAISGYSYFKKTSPKKKPRFMLGSAYTAIAIMLVATAGLMYAFPVFKLPEPTGEFKVGTQTFHFVDTNREEIFDEAREGKRELMVQVWYPAQTSTGKYAPFIPDTQILRYMAANYGLPEFTFQHLKYVSSHAYSGAEVSSVQTSYPLILANPGNGSSRFLNTSQAENLASHGYIVAVIDHTYNTFATEFPDGRITTSTTNDLFSPDHDYQTSRGNRDKLGKVLTGDVAFALDQFEFIQSGQIPSHLKGRIDLGHVGVFGHSIGGATAYDASYDPRIAVGIDLDGGLYRLRDREGLRKPFLFINSESYFEKLKMVMDNRVYTDAELNRMGSTREWEDQVTEDKKLELERMRETVDEGGQVLYIENTEHLNFADVQFISPIFKMLGITGKIAPERANSVINAYMLDFFDMYLKNQGGILMKGPDNRFPEVKFVTSLL

SEQ ID NO: 338 - DNA, 498 bp, Paenibacillus polymyxa
  source 1..498: mol_type = genomic DNA
  misc_feature 1..498: note = strain Sb3-1
gtgtcgttcgacaaactaaaagctgtgattttgacgcatcaagatgtggatcatataggaagtcttcctgagatttcgcaggagtgtggcaatcatattaaagtctatgcacacgaactagataagccgtatattcagggggatatcacccttttaaaagatagtcaccttgagatcccccgaaaggcaaagtggacaataccttaatagatggtcaggcactgccgttttgcggcagaattccagtcatccatacgcctgggcatactcctggtcatatcagtctttatttaagacaaagtgagactcttattgccggggattcgatgtacattgtaaacgggattctggtgggggattcatgtcccgaccacaccggatatgggtgcagctcgtctctcattagatctcgacattgcatccatagtttgttatcacgggggattaagtaatgtacatgtgaatgatcagatattaggacttaccaaaggattataa

SEQ ID NO: 339 - DNA, 576 bp, Paenibacillus polymyxa
  source 1..576: mol_type = genomic DNA
  misc_feature 1..576: note = strain Sb3-1
atgaatgaagatatcagaatttataaaacaaaaatagctatttagcgagctttcattgaattactccaacaacatgattttaaagatattacgatcaaaaaaatttgtgatcaagctcctattggatgttctactttttatagtcattatttggataagtacgacttgctagaaaaaatagctaaacagtatgcttctgattttaaagttgaaatcgagcagcgttttgattccacggaagatggcaaggttgcaaacgccatagaacttgtaaccgatcaaatgattaaaaataagatggaaatttcaacattgttaaccgttcatgaaatatccgctgatttacgtaaagaatttgaacaaattttgtttagtacttgcttagcttttttaaagcaacagaattcttcaacttcgatcgcattagagtatttagctgaactatatgctgctaactcaatgacgtctattcagtgggttttaaaaaatggcaaagatgctaacatcattcttcttttagatcaaatgcaagaatatatttttaatcagttaaagtctgatctatatacaagttag

SEQ ID NO: 340 - protein, 151 aa, Paenibacillus polymyxa
  REGION 1..151: note = strain Sb3-1
MFKSYVHNEQFNLQINRFINDYYQEDDRAQADLEKMIPKLKDTHSWYKAWLNFAKKREDSKDYDLALVYYQAAEFYLATTDLNKEKMYQKYRETFNKGFHDFDYESYKIPYEDSYLPAVKLLAPGVTKTLLVFGGYDSYMEEMLKMMKFMR

SEQ ID NO: 341 - protein, 312 aa, Paenibacillus polymyxa
  REGION 1..312: note = strain Sb3-1
MVKQRKILLTATIVYTIIVLYFMFFAFGRGEASEQISSYTFIFMPENFISLPSPADLLHPSLMSMVAFGNTIAFIPFGILIPWLYRVSFVRFITLFFIAILVLETIQALTFLGSFDINDALQNSIGAALGFGAYKLGFRYRSLGRNLVATAISGMVLFIALWGLGAAVDKITTKVEGPFVAITEWTDNSGNSSTGDKPDSIQINGQKIPLRYNLYGAEGGDSRTFTYKSEGQTIFSFDYGCPEPTDYSGSISVTRDGKEIMSNFGELQRTNPDLFPSLFKIPLEPGDELKITIKGDMKAWDVGYTRMQYFWN

SEQ ID NO: 342 - protein, 74 aa, Paenibacillus polymyxa
  REGION 1..74: note = strain Sb3-1
MSHKYTLSQQNYWNNRSEQWKLPLYFSKLVLHHIKHFVDGMLSTGFSGTLTDIYRESLQDRDRRTLSHFLTHGN

SEQ ID NO: 343 - protein, 305 aa, Paenibacillus polymyxa
  REGION 1..305: note = strain Sb3-1
MREIAQRGHGPLFVILDDTVCEKNKPSSQATHRIQGASFQHSHLKGQSVYGHVVVQALLRSGDRVFPFASERYDREAKSKIDLACEMIRSVPMSTCRTYVLMDSWYPSASVLQTSAERGFHVISGLKTNRIFYPQGIRQSLKNFASYISKSDTVLVTIGSSAYRVYRYEGKLNLLENAALLLCWKEGDGFEPKQIKAFLSTDISLSNEEILCYYSKRWDIETYFRTAKVQLAMDRYQVRSTQAIDRYLTLLMFSALYCQYDSQGSLNDGLHHYRIQKKHDMIDYIYNQAKSGATLDQIKTWLSVA

SEQ ID NO: 344 - DNA, 501 bp, Paenibacillus polymyxa
  source 1..501: mol_type = genomic DNA
  misc_feature 1..501: note = strain Sb3-1
tatttagctatgcgtgcagcagccttcgaaaagagaatcgataaagtagttgcttttaacattttctattgtggtttagatgccttaaaaatgggaatgccagaagaaacttaccagagcatagtgcagttagtcgattgtaatgaagtagatcaagtgaattcattattcgaacagatgatgactcacaatattgatttgcattggaagattaccaaagggatggaaaacaccggtgaagcaacgccttttgatctcattaaaaattttgaaaagcacacgatgcaaggcattggggcgttcattaatcaagatgttcttttactagctggagaagatgatcaatacgtacctattagccgactcgcacaaatccaacaagaattaatcaatgctgcttccattacaaccaaagtatttactaaagaaacggggggtgagcaacactgccaagcaggtcacagggagttagcatttaatgaaatgaagaaattcctataa

SEQ ID NO: 345 - protein, 401 aa, Paenibacillus polymyxa
  REGION 1..401: note = strain Sb3-1
MSSNNSSTTVKIAFSASSERFPWLGLLALAMTGFICIMTETIPAGLLPQISKGLHISEAMAGQLVTVYAIGSLVAAIPVAIVTRQWRRRPLLLLAICGFLVFNSVTAISSSYILTLAARLLAGVSAGVLWGMIGGYALRMVSATLKGRGMAVAMVGTPIALAIGVPAGTFLGNLMGWRFVFGIMSLLTVVLIAWVLWKVPDYPGQSSDKQASINAVFLTPGIRPILMVVLTWMTAHNILYTYIAPFLASNGMGERVGLALAFFGIAALVGIWITGVFIDRWLRKLVLISLISFVLISIAMSLSNSNVFMIYIIVTVWGLTFGGAATLLQTALAQAAGESKVDLVMPINTTVWNLAIAGGGMAGGILLETFGAGSFSWALFILLFLALLVAWGGKKYSFPPQ

SEQ ID NO: 346 - protein, 200 aa, Paenibacillus polymyxa
  REGION 1..200: note = strain Sb3-1
MVRTGRPRKFCRDEAISQAMMLFWEHGFESTSLAQLKKAMGGISSASFYAAFESKDALFKEALDRYLATYGQVSTSLTNYSLSSRTAIELALRSSAIMQTEQTHPLGCLVIFSANTCSPENTHIRELLIRQRAVTRNKFYARIERATKNGELQESTNVSMLTTLFVTFLEGISTEARDGVSLDNIDAAITKLMELWDTCA

SEQ ID NO: 347 - protein, 280 aa, Paenibacillus polymyxa
  REGION 1..280: note = strain Sb3-1
MNELLIKSDGIEICSESFGERVHPAILLIMGAQSSLIWWEEEFCQRLADTGRFVVRYDNRDVGRSTTYEPGQPDYTFEDMADDAIRVLDAYKIEQAHIVGMSMGGMLTQMIALRHPERVLTVTLLATSNFAPDLPPMEEKVMDYFSNMEAIDWTNEQSVVDFVVGRSRILVGSKHSFDENKVYQLAKEEWKRSNNMASMNNHAMLSGGESYLARTGEINVPTLVIHGTEDPIIPYEHGIHLANEIPGAFLLALEGAGHEIHYDDWDLIIDSISKHTSMPN

SEQ ID NO: 348 - protein, 474 aa, Paenibacillus polymyxa
  REGION 1..474: note = strain Sb3-1
MKLHTKFSRQLCRNIELICSFMGNSSDFVVREITTGHKHAALFYLDGMTDMQKVQDNVIRPLHDRVSSDEITLPLLKNAILDIGEASFTQNFENALEQILSGGLLLLLDDMDEGLVISLPGWEERSISDSKTQPVVRGPQEAFTETLRTNTTMVRRRVKDTRVRLTTMKVGEKTKTDISVMYLYGVADPKKVQDMISKLKNMHVEGVLESEYLEECLHDKQLTIFPLFYNSDRPDSIAAGIMEGKIAIFVDGSPFAILAPAVFADFLQSAEDYYQSFVYSSIIRILRYICLAICMLAPAIYVALTTFHQDMIPTVLLLSLSAQREGVPFPAFVEAMIMEVVFEILREAGLRMPRTVGQAVSIVGSIVIGQAAVEANIVSAVMVIVVAITAISSFVIPSYTFAIPIRILRFAFIGIAAMFGVYGLTVGILMLFVHLNGLHSFGVPYLSPFANYKSSEQRDAILRFPYRTKKHRKN

SEQ ID NO: 349 - protein, 402 aa, Paenibacillus polymyxa
  REGION 1..402: note = strain Sb3-1
MNSYRSTILLLFMCIWLMVFLTGCWNSKELSAISVVMALGIDAVDDQYEVSLQVVDPSKMSQNSPTERTPTIVFSKRADTIFEAIRKLTTESSRKMYMSHLKFVIFDEKTAKKGIKEPLDFLFRDHEVRPDFYLAVVRENSAKEAVTFVAPTEVLPAMDMYKALKISEKAWAPTSAVNVKDLLQKFTEDGIEPVLTGIRLTNLEKGLTIDNVTKSPQHVKYFFTGIGVFRGDRLIDWMDDSQSKAFTYISNRVSSTVASIDCPNSKGKFVVEVIRSKVKIHPEIIDHEPRISLIVDTESNIGTISCNANPKNEETFRDLQESAKEHLQQSLKKGISHAQQIGSDIFGFGEAFHRKFPREWHRWKEDWPQKFQTLKVDIQLNYRLVRFGDITSPIDMGIHNQE

SEQ ID NO: 350 - protein, 75 aa, Paenibacillus polymyxa; identical to SEQ ID NO: 68
  REGION 1..75: note = strain Sb3-1

SEQ ID NO: 351 - protein, 366 aa, Paenibacillus polymyxa; identical to SEQ ID NO: 67
  REGION 1..366: note = strain Sb3-1

SEQ ID NO: 352 - protein, 230 aa, Paenibacillus polymyxa
  REGION 1..230: note = strain Sb3-1
MRINKYISETGFCSRRETNRLIAAGRITINGSVCEAGAEVEPLDIVLIDGKPIPINHSEPVYLALNKPIGIVCTAAEQVEGNIIRYVNYPSRIFAIGRLDKASEGLILLTNDGSIVNQMMRSEHGHEKEYVVTVDKPVTDEFTQTMSRGVEILNVITKPCKVDRISEYEFRIILTQGLNLQIRRMCKALGYRVLKLERVRIMNITLDHLERGQWRHLEKEELELLLAKLQ

SEQ ID NO: 353 - protein, 63 aa, Paenibacillus polymyxa
  REGION 1..63: note = strain Sb3-1
MGGKSKGGGTGRGTGSKGWTRWNKTAKPVKRKSAATGAPGNTAAGAAKGGAAKPIGNRGGRSK

SEQ ID NO: 354 - protein, 142 aa, Paenibacillus polymyxa; identical to SEQ ID NO: 64
  REGION 1..142: note = strain Sb3-1

SEQ ID NO: 355 - protein, 127 aa, Paenibacillus polymyxa; identical to SEQ ID NO: 63
  REGION 1..127: note = strain Sb3-1

SEQ ID NO: 356 - protein, 191 aa, Paenibacillus polymyxa
  REGION 1..191: note = strain Sb3-1
MKVLSVVSHPRKDSLTFKVAGRFVQGLANAGHDYEILDLHGIGFDPVLKGVDEPDWSVAKQSFSPEVEMEIKRMKEHDALAFIFPLWWWHLPAMLKGYIDRVWNNGFAYGSNNLHHQHILWIGLAGVSKEQLKKRNYDEMITHLLNVGIADYCGVSNSKVEFLDETLGSNSGHYEILLDQAYSLGLNYAKD

SEQ ID NO: 357 - protein, 335 aa, Paenibacillus polymyxa
  REGION 1..335: note = strain Sb3-1
MKLSRNSRGISIILLLTMLTLLVAILSMNVGKMNLSPLEVFKVIIGEGTNKQNLIVFEFRLPRIVLSVLVGIGMGISGCIMQSLLKNDMASPGTLGISSGSGLFVLLYITLFASEGLLSPIILPGLAFAGGLTAAFLIFMFAFRRGRDISPTGLILTGVAMGSGYSALSLILTLRLDKQQYDFALRWQAGDLWGDDWSYIMVLLPWVLIICLYVFYRSNTLNTLNLGNQTASGLGVAIKREFIGLTIAAVALASGSVALGGNFFFVGMVSPHLARRLVGPNHKLLLPTTALVGALVILIADTLTRTISFGADIPTGIIITILVTPYFLYLLSKAN

SEQ ID NO: 358 - protein, 341 aa, Paenibacillus polymyxa
  REGION 1..341: note = strain Sb3-1
MSTHKEQNKKGIFHFVSYMIAGVFLLLVVSAASITFGAAEMSLKLAWGAVFQFNPNITEHQIIHTLRFPRTVADIIVGCSLGVCGAIMQGTTRNPLADSGLIGISSGSTFAIALCMAFLPGRTYGETMLYSCLGAAITTGITYYIASIGKRGMTPQRLVLAGMSISMLFGAFSTFLAIKYEIGQALDYWSAGGTASAKWSELAFISPLFVVGLVCAIALSPSITILSFGEEVASGLGIRANRIKLFSTLIVLILTGLSVIVVGPVGFVGLIVPHIMRYLVGTDYRYIIPTSALYGAVFLLAADLLGRMINRPHETPLGIIFALVGVPYFLYLVRKQRREFS

SEQ ID NO: 359 - DNA, 690 bp, Paenibacillus polymyxa
  source 1..690: mol_type = genomic DNA
  misc_feature 1..690: note = strain Sb3-1
atgcctttttacgataagtttaatgggattcctgttattgaaaagtgggagaccgaggaaattatgaaatacgatcctgatctcatcattacatatgacacaaaggattatgataagttgtccaaaattgcgcctgttcttgtaatacctgagggtaaaatgacatctgttgaacggttgaaattccttggtcaggccacaggacatgaagcagaagcggataaagtgatttcacagtttgaaagcaagctgagtgaggccaaagaaaaacttaattccgatatattcaaggacaaaacatttagcattttcgaggactggggcagtggatcctacggaatatattatgaaacaggctcacggggaggaacgttgctttacgattttctaggacttcacaaaccggaaaagctcaatacattgattaaaaattccggagagagtcgaggctctttatcctatgaggtagctgctgaatactttggggattatgtactgtggtttaagcaggaaggcaaagaatccgaatatgtgaagaccaaaatctggagcagtattccagccgtcaaaaatgggcacattatcgaaattccagcgaaatatgcaggacttttctattattcagacgttgctagtatgacaggacagctagattatattattggtaaattactggaacagacgaagtaa

SEQ ID NO: 360 - protein, 149 aa, Paenibacillus polymyxa
  REGION 1..149: note = strain Sb3-1
MKKIYREQEIIDMTIKLLEQTSMYEEQYEQYVRRPFRTDFYDDLSPYVKVGKQGYTLQMYERGVQMLNKLTQDVEDVMYWIIEDTIHIIAHLNLLRKYKVDNQNTHLKYTKEIMKELTTAMNNAFYEIGGIYQEWHEANRRAMLENPLK

SEQ ID NO: 361 - protein, 144 aa, Paenibacillus polymyxa
  REGION 1..144: note = strain Sb3-1
MNRVWTKASAILLVVISLIFNGTYALAASATSTYIVTFQQATLVSNDHVGNNWAIAAQVAGQSISEGNNVKVKAKSGGSIKLYAYAEEQDKIPDVGEATKNVKVSSVSSKGSTVKLRVTVTENRGRYSGHQAVWEFTYKIKKQS

SEQ ID NO: 362 - DNA, 918 bp, Paenibacillus polymyxa
  source 1..918: mol_type = genomic DNA
  misc_feature 1..918: note = strain Sb3-1
gtgagtcaatttttgagtgaaattccaggtgccagcgcatggaggaacgtgcaagaaattcataaaggctggtccagtgacagcaaatattttattcaatccactgacggtagagatttgctgctgagaatttcgaatatcacccaatatgacaagaaacagcgagaatttgaatccgtaaaaaagctggatcatatagataatgttctaatgtcccgtccgcttggttttgggttgtgcaacaacggacagtcggtatactctttatttacctaggtcaacggggaggatgctgaaggaattatacccacattaaatgcagaacagcagtatcaacttggagttcaagctggaaaggtattggctaagttgcataagatttacgcagagcaagatcgcgtcccatgggctgaacattataatgccaaaatcaacagatatatcagaaactataagtcatgcggtattgctttaaaaggagcagatcaaacgataagttttattgagcaaaaccgtcatctattagaaaatcgcccccagacatttcagcatggggattatcatgtgggcaatatggtgatcacctcatctggtgaactgggtatcattgatttcaatagactggattatggcgatccctgggaagaattcaatcgcattacttggtgtgcaggattaagcccattatttgcttctggtcgtattcacggttatttcaataacgatgtgccggatttattttttaggttaatggcactgtatattgcaagcaatcagatttcatcgattcactgggccattccatttggcaaagaagaggtagacgatatggtgcaacgagctgaagaggttttggaggggtatgattactttcaaacggttataccaaaatggtatctacctcgttcacctgagtag

SEQ ID NO: 363 - protein, 673 aa, Paenibacillus polymyxa
  REGION 1..673: note = strain Sb3-1
MNYYPAIFEPLTIRRMTLKNRIVMPPMGTNFAAMDGSFVQDHIDYYVQRAKGGTGLITVENVCLDFPMGTNGTTQLRMDNDQFIPGLFRLTEALHSYGACVSVQINHAGASAYAGRLNGVQPVSASNIPSKKGGAIPRPLQKEEIYAIVRKYGEAAGRAQRAGFDCVEIHAGHSYLLSQFLSPVYNKRTDEFGGSAENRTRFARLVIDEIRSVVGPFFPICLRFSAEEFTEGGNTLEDTLELLEYLNDEVDILNVSAALNDSIQFQIDGMNLPDGWRSYMAKAVKEKFGKVTMTSGNIRSPQAAQDILARGDADLLAMGRGLIAEPNWVLKVQNGYEHLLRKCISCNIGCADHRISKSKPICCTVNPDLFKEAEYRKQRVRNSVQVVVIGGGTAGMEAACTAAEVGCKVTLFEEKPELGGLARDIARLPDKTRINDFPDYLIQRTKQLTNLNIVTGTRADMSMISALNPDVIVNATGAKPLLPPIAGLHDQLGKPGTKVFSIFDLLNNIENFQEFEGKRIAVVGGGAVGLDVVEYYAERGAQKVSIIEMMPLLGKDLDMITRISMMKMVEERGVNVHTETALTEVCSDRFKVKHGEQEFEIPFDLGFVCLGMRSYTPLMDSLLQYGKEHQVEVVNIGDSKQARRIIDSTREGRNILKTIQRVDEFKNEFSYSY

SEQ ID NO: 364 - protein, 176 aa, Paenibacillus polymyxa
  REGION 1..176: note = strain Sb3-1
MRHKGINQTFTHLQTSAEEDQEWEYSRARDMAILGLWDEYTLSAQRLCERMATVTRQIRPSEYETFPTQFEWLEQRETDLIIDGIWSADLHGDHCLFVNIGEHHPEWHTSIEAYICDTQVIDEGFFLQYLNTSPKARTYASSFRKNGYATMCELLDRYVREGKLERRPFGFKRTNA

SEQ ID NO: 365 - protein, 291 aa, Paenibacillus polymyxa
  REGION 1..291: note = strain Sb3-1
MRKVKVAATQMSCSTNIEENISKAEKLVREAAAQGAQIILLQELFETPYFCQKEKSDYYVYATELEHNKAVNHFKKIAKELQVVLPISFYEKKNYARYNSLAVIDADGEVLGKYRKSHIPDGPGYEEKFYFNPGDTGFKVWNTRYAKIGVGVCWDQWYPEAARCMALMGAEILFYPTAIGSEPQDSSIDSKDHWQTCMLGHAASNLIPVIASNRIGMETDEESSINFYGSSFIAGPQGNKITEASRTDEEVLTAEFDLDELEVRRIEWGIFRDRRPELYKMIATYDGDLKV

SEQ ID NO: 366 - protein, 343 aa, Paenibacillus polymyxa
  REGION 1..343: note = strain Sb3-1
MQIKDSHYKMPPEWAPHERTYISWPVQSSMVYPEMHAEVCKGYAEIISAMAEFEPVTVVVNPDDLESVKALELGERVELLPIEHSDAWLRDNGPTFLTDEHGQLAGVNWKFNAWGGKYAPWDLDDQVAPQILDQLGVPRLDAPLVMEGGSLHVDGEGTLITTEECLLNPNRNPELSREDIERYVCEYTGAEKIIWLKRGLSGDETDGHVDNIACFAAPGKVIMQVCDDPEDENYEITQENLRILEQATDAKGRKLEVIQIGQPPRVDYEDSRLTLSYINFYFVNGGIILPVFGGTAAESDLAAQQVLAKVFPNRKIRTVDGMAVIREGGNVHCTTQQMPAVKR

SEQ ID NO: 367 - protein, 183 aa, Paenibacillus polymyxa
  REGION 1..183: note = strain Sb3-1
MKLMFISDIHGSLYWLQLALEKFKEEKADRIVLLGDYMYHGPRNPLPEGYNPAEVAAMLNQYKSHIAVSVRGNCDAEVDQMLLEFPMMGDYALLYHEGRRIYVTHGHGFSIGNLPPLEAGDVFIQGHTHIPVADVENGVFVLNPGSIALPKENYPSSYGVLEGAQFTVKDFDGSTVKTITFSK

SEQ ID NO: 368 - DNA, 96 bp, Paenibacillus polymyxa
  source 1..96: mol_type = genomic DNA
  misc_feature 1..96: note = strain Sb3-1
aaagacattccttctggcgtgattgccgcaggaaacccttgcaaggtcatccgtaaaatcaccgaagatgataagcacaagtataaaaggaattaa

SEQ ID NO: 369 - protein, 471 aa, Paenibacillus polymyxa
  REGION 1..471: note = strain Sb3-1
MSTQFPKDFLWGGAVAANQLEGAYQEDGKGWSIQDVTPRGGWGPVTDVPTEDNMKLIGIDFYHHYKEDIKLFAEMGFKVFRTSIAWSRIFPNGDELEPNEKGLQFYDDLFDELHKYGIEPLVTLSHYETPLHLSREYDGWVNRKLVDFYERYATTVFNRYKDKVKYWLTFNEINSILEAPFMSGGISTPKDQLSEQDLYQAIHHELVASARAVKIGHQINPDFKIGCMVLSMPTYPLTPNPDDVIAAMEFDHRNMAFADIHARGQYPGYMKRFFKENGISIHFEPGDAEDLKHTVDFISFSYYMSTCETADEAKKVKGEGNILGGVSNPHLEASEWGWQIDPQGLRYVLNTFYDRFQKPLFIVENGLGAVDELITNEKGEKTVEDDYRINYLNDHLVQVGEAIEDGVEVLGYTSWGCIDLVSASTAQLKKRYGYIYVDRHDDGSGTLERYRKKSFHWYKEVIATNGESLKR

SEQ ID NO: 370 - protein, 302 aa, Paenibacillus polymyxa
  REGION 1..302: note = strain Sb3-1
MATCGNILNELLQTGEVLELELEESNGGRPARRYKYNADYSYIICLTVKTEGGVDSLTYAVANMLGDIIAENTSVVPHIDYEVIDHQIEELINNYENVKAIGIGIPGVVHQGVIDVCDLDLLIGVPVGPRLQDKYGVEVTIENDMHLTVYGFYNMQNYDEDKTFAIVTFPKDNFPGAGFIVDGHLLKGNTKFAGEVSFLPFGITREEQLKQLNSTQEFVFLAIKTITSIIAIIDPVSIALTGELSKPALLDDIYNGCLKDVPKEHMPEIFVKNDTHDEYMYGLISVTLESLTYNLQLVEKRK

SEQ ID NO: 371 - protein, 111 aa, Paenibacillus polymyxa
  REGION 1..111: note = strain Sb3-1
MATSEYVAIIALILSVILLFKVYRLQSRLNDLKSDVERLENRSGLTGTSMSNTIAPPAPHIQHSEASEEINERLLLLIREGNKIKAIKELRTAKNLSLKDAKDYVDHLEKR

SEQ ID NO: 372 - protein, 159 aa, Paenibacillus polymyxa
  REGION 1..159: note = strain Sb3-1
MSISKTNAMRILDGQHIHYNILSYDHQDGKIDGMNVAEKIQRAPESVFKTLVAHSKQNLFVFVIPVHKELDLKKAAKSAGEKKIEMLPVKDLQKHTGYIRGGCSPIGMKKIYPTYIDQPAVELETIVVSAGKIGTQVELSPHDLAQIIQAQFTDLTHTA

SEQ ID NO: 373 - protein, 396 aa, Paenibacillus polymyxa
  REGION 1..396: note = strain Sb3-1
MHNDCSKKVGIPQPIRSDGAGGIDKGPRDVMRDLQNPDMLVPPVTDNGLIPNMRFSFSDAHMQLNHGGWSREVTVRELPIATTLAGVNMSLTPGGVRELHWHQQAEWSYMLLGSARITAVDQDGRNFIADVGPGDLWYFPPGIPHSIQGLEEGCEFLLVFDDGSFSDLNTLSISDWFAHTPKEVLSANFGIPEADFAEIPQDQVYIYQDSVPGSIQSQAVPSPYGTLPQSFKHELLAQPPIKTPGGSVRIVDSSNFPISKTIAAALVEIEPGAMREMHWHPNNDEWQYYLAGQGRMTVFGGNGAARTFDFRAGDVGYVPFAYGHYIQNTGSSTLWFLEMFKSDRFADVSLNQWMALTPKELIQSNLHVGADVISNLRKVKWPVVKYPGYSYDPKKK

SEQ ID NO: 374 - protein, 286 aa, Paenibacillus polymyxa
  REGION 1..286: note = strain Sb3-1
MKDRNIALITGANGKTGSRVAARLMQLQYPVPLAGRTKPGNSEGADYVFFDWYDESTHAQALMNVGKIYLVVPVLDVNPAKVMIPFIEKALSAGVQRFVLLGSASVPEDGPVFGPVHQALRRLAPEWAVLQPSYFMENFTEGQHVGTIKNNKAIYSATRNGRIGFVSADDIAEVGVRALIDDKPHNTAHVITGPQSLTYDEVAELIGKSTVQPIQHISLSDEELKAGMVHAGMPEEYADMLAGLDRRIRENGSEDQVTDTVKLVTGRCPVSFEQFVLSHGNSWKTS

SEQ ID NO: 375 - protein, 142 aa, Paenibacillus polymyxa; identical to SEQ ID NO: 40
  REGION 1..142: note = strain Sb3-1

SEQ ID NO: 376 - protein, 194 aa, Paenibacillus polymyxa; identical to SEQ ID NO: 39
  REGION 1..194: note = strain Sb3-1

SEQ ID NO: 377 - protein, 239 aa, Paenibacillus polymyxa
  REGION 1..239: note = strain Sb3-1
MGRKWNNIKEKKASKDANTSRIYAKFGVEIYVAAKQGEPDPESNRVLRVVLERAKTYNVPKAIIDRAIEKAKGAGDENYVELRYEGFGPNGSMVIVDALTNNVNRTASDVRSAFTKNGGSLGVSGSVAYMFDSTAVIGLVGKTADEVLELLMEADVEVRDIIEEDEAVIVYAEPDQFHAVQEAFKQAGVTEFTVAELTMLAQNDITLPEDAQVQFDKLIDALEDLEDVQQVYHNVDSEE

SEQ ID NO: 378 - protein, 254 aa, Paenibacillus polymyxa; identical to SEQ ID NO: 37
  REGION 1..254: note = strain Sb3-1

SEQ ID NO: 379 - protein, 581 aa, Paenibacillus polymyxa
  REGION 1..581: note = strain Sb3-1
MRQSQLLLTTLREAPAEAEVISHQLMLRAGFIRQLAAGMYTYMPLGRRVLRKLEQIVRDEMDRAGAGELLMPVLQPTELWQESGRYDVYGPELMRLQDRHDREFALGPTHEEVITSLIRNEVNSYRKLPVTLYQIQIKFRDERRPRFGLLRSREFLMKDAYSFDANWAGLDHTYWTMFQAYQRIFTRCSLNFRAVEADAGAIGGEGETHEFMALAEIGEDTIVACTCCDYAANLEKAEPRTTGSVGISSVSNEDEHDSHPSIDTDKMEKLYTPGLRTINQLVETLHIDPKEIIKTLIYMADDQPIAIVVRGDHEVNEVKVKQILGSEKFEIANADAVTKATGTPPGFIGPCGLTIPVWVDYAVVQMSSGFAGANEQDYHYRHVNSGRDLDLRYVADLRNVIEGDRCPRCDEGKLELHRGIEIGHVFKLGTKYSEKLGATFLDASGTDQAMIMGCYGIGVSRILSAIVEQNHDQNGIIWPHALAPFQVHIIPISVKDRLQMQIAEDLYSQLQDRGVEVLLDDREERPGVKFKDSDLVGIPVRIVVGKDAEHGKVEFVERRSSHKESIHIHDVERRILNLIQH

SEQ ID NO: 380 - protein, 231 aa, Paenibacillus polymyxa; identical to SEQ ID NO: 34
  REGION 1..231: note = strain Sb3-1

SEQ ID NO: 381 - protein, 347 aa, Paenibacillus polymyxa
  REGION 1..347: note = strain Sb3-1
MKLKKIHKNEQDEPWPSSEQILCIGGANLDRKIMIKGTFQLHTSNPSSTSLQSCGGVARNVAENLGRLSRRVSLLTAVGDDAEGEFIIEQSSRYMHVIPLQVKGESSTGVYTALLNEDGEMIVATAEMEIYDQIRPSVIFENIPLIASSRLVLLDTNFSMNVIAATIHVCLEHQVPLVVSSVSASKMRKLPRNLHGVEWLVCQPEEAEAYLGLELKDDQQILDAARVFHKLGVQNVIIICGVERVLFASQDGTYGQIPIHPFQQVIDVTGADDAFIAGMIYGITQGYPMEQVCQFGISCVDLTIQTDRTVSDTISMNKLHSRFQELYGTHSQNFVFFKGVYFKKKNT

SEQ ID NO: 382 - protein, 429 aa, Paenibacillus polymyxa
  REGION 1..429: note = strain Sb3-1
MKHHLTAHTPPMGWNSWDCYGAAVREEEVRGNAQYMAEHLKEYGWEYVVVDIQWYESGAVSSQYRPFVPLEMDLYSRLIPAVNRFPSAADGRGFQALAEYVHGLGLKFGIHIMRGISRQAVHQDTPILGTTATARQIALPNSICPWNTDMYGVDASKEGAQEYYNSLFDLYAEWGVDFVKVDDIAASRLYGIHLAEIELIKRAIAQCGRPMVLSLSPGPAPLEHASDLIANANMWRMTDDFWDVWPLLYGMFERCEKWAEHVGPGHWPDCDMLPLGHLGIRSVDSVDSGSHDRWTRFTKDEQLTMMTLWSIFRSPLMFGGELRDNDEWTLSLLTNKEVLDVHHNGVNARQVYRKDEHIVWTSHNEEGHVYAALFNAGDEASTVRVSLQELGIEGQASARDLWNHVDLGDIVQELSADLPPHGAALFIIK

SEQ ID NO: 383 - protein, 297 aa, Paenibacillus polymyxa
  REGION 1..297: note = strain Sb3-1
MCEHAYRILLFYKYVNIEDPATFTAEHLAYCKELGVKGRILIAEEGINGTLSGTVEQTEQYIRDLHANPKFHDIVIKIDESDGHAFKKIFVRHRQELVTLRHEDELDPNVISGKRLSPKEFYEQLQDEDVVVLDGRNDYEYDIGHFRGAIRPEVESFREFPQWIRDNMAGFKDKKILTYCTGGIRCEKLSGLLIKEGFNDVAQLDGGIVTYSKDPEVQGRLFDGKCYVFDERISVRINHTDEDVVVGNCYHCETTNDHYINCPVCNLQHIVCPDCEEQHQHYCSDDCRTKAETMASA

SEQ ID NO: 384 - protein, 308 aa, Paenibacillus polymyxa
  REGION 1..308: note = strain Sb3-1
MVQIVLSTLLSVIVPLSIPVIAGFLLGKFMKLETKPFSTLYLYFLSPAMILDTLLKAQLSWHDVALTAAFSLLNLLLLWGIAQLAGKIFRLSTPETAGLTLISTLTNSANYGLPLILLAFGQLGLDKASVYVVIQMIMVNTIGVYFAARSEFSVQSAVKSVFSLPAIYAALLALGLRALDWHLPSGIQSGVSMIAAAYSPVVLAILGTQMAYVKIFRLEPSIKKASYAGLIIRLLLSPLAACLAMLILGISGLLFSVLFILASMPVAVNAVILAEKFNASPKLVSTCILWSTLASFLILPILIMLVAS

SEQ ID NO: 385 - protein, 259 aa, Paenibacillus polymyxa
  REGION 1..259: note = strain Sb3-1
MNSVIELNNVSWKRDNRTILDQINWQVAEGEHWAVLGLNGSGKTTMLNMINGYIWPTTGSVGVLGHTFGDVDLRELRKSIGWVSSSLQERINGSQRTQDVVISGKFASIGLYDQTTDTDDKQAVQLMTQLGCAHLVDRLYQGCSQGEKQKVLIARALMASPKLLILDEACNGLDFFSREALLDSVRQLSEAPGAPNLLYVTHHIEEILPMYTHTILIRRGTVFAKGKTTDILSSETLSAFFETPVQVDWRQDRAWLSMV

SEQ ID NO: 386 - DNA, 513 bp, Paenibacillus polymyxa
  source 1..513: mol_type = genomic DNA
  misc_feature 1..513: note = strain Sb3-1
ggtacttcctatgtcgatatttttaaccccggtgatgtatggtatttcccccgtggttatcggacttgcagccgacgagctggctcttttgccaaagaaggaagcttattttgcaaaaagacctgtcccatctatcgcatctcatgatgcatatccgcgcgcttcttccgatctaattactaaacaccgctatcctttaatggccaaacagcccagattggcaccgggtggagggactcagcggaccgttacagtagaagatttccctatttcttcgacgatggcaggatctgtgattgaattagagccaggcggattgcgagaaatgcactggcatcccaatgcggatgaatggcaatattatttggacggagtggtcattacgaggccattgatttgagtgagtggatggctggcaaccctgttgatgtattggcaacaaatctgagcctgcctcgggaaatagcgcataaactgcctcataaatcagtcttcatcgcccaaaaatcttaa

SEQ ID NO: 387 - protein, 287 aa, Paenibacillus polymyxa
  REGION 1..287: note = strain Sb3-1
MNSSQAQALRSKWHKTQLLLQHGSIKPFVPETRKYSKANVKSMLEKYGMVYVKPERGTFGKGVMKVEQEAGQRFAYQYEEKRLEFKHLDALITSLSKHTGKKSYLIQKGIHLLRHQNRYFDIRIMVQRNAKGSWESTGIIGRLGHPRKIVTNYHSGGKPMALEQLLQSHLSQSKQAELVNKLNELGITIATQLQKTYPKFRQIGVDIGLDHRFIPWIIEVNTKPDPYIFNQLTDKSMYRKVISYWRLANEKKKVTVPSKDKKNNNKNKDKVANKVDHTNKEPKSKKG

SEQ ID NO: 388 - protein, 278 aa, Paenibacillus polymyxa
  REGION 1..278: note = strain Sb3-1
MSAQSDEPQKGSLSIDVLIPAIEKDLATLPLVIDSLRRHVQHRIATIYIVSPQSTKLRRLCANKKCTFIDEKTVLPITKKHIRYGTTRWDRSGWLYQQLLKMNGDKISKSSFFLVIDADTILIRPHTFRKDGKTIFYYRSWSQPEYFRTYRKLMGAKAPSPKSFVTHYMLFEKTRLAQLKQVIETRHGEPWYNAIIQSIDRTKQFGFSEYETYANYLYSNQPSRMILRKSLNKALHSRASSLSPKQLDLYAQSYRSLSFHQRKVYQLAPKTKIQSALK

SEQ ID NO: 389 - protein, 447 aa, Paenibacillus polymyxa
  REGION 1..447: note = strain Sb3-1
MRIVLLCGGAGKRLWPLSNDIRSKLFLRLLPAPDGQQESMLGRVYRQLTLAGLDSSALLLAHRSQVNLAFRHTEGRLPVLGEPAKRGTFTAAALAAAYFHTRGMGLDEVLCIAPADMFAGDDFFHSIAALSGLLLESGADLAMLGTRPTHASDQYGYIVPDLQMRQEGKSAYAQVARFTEKPDLSWAKQLINQGALWNCGIYAFTLRYMLSCMEQIQLPLNDEELYTIYDSLPVRSFDEEIAERTERAVVLPYEGEWHDIGNWQALTEQLGSRVIGRGQISGQTHGTHIVNELPYPLHVIGVEDIIAAASPDGILIASKSHAHAIKEQLGNLQLHPMHGETSWGSYRVLDEFDHRSPNDILAIRLTVLPDHRLNGRIHGSGLKVWTIVSGRGEVMLNGERFAAASGSVFSIPVDTYHTIRADLDTALELIEVRLGHSLVSAFYKSDS

SEQ ID NO: 390 - protein, 241 aa, Paenibacillus polymyxa
  REGION 1..241: note = strain Sb3-1
MQVKRYMLGKGSSWATPYYVAIEGQKGPCAMVVAGIHGNEIASIRAAEKLVKLLNEQKLRFSHGKLIIVPIVNQEAYRKRIRGKPDLNRTFPRQKKQAATQPLSAALFKLTQKHHPEWYLDLHEANGLSQKDAKVLGQTLISNKGNPVIPMTRRIIKRMNRSIKVKDRHFNMRLHELPGSSRTAAARILGARAVTVETGWSLPEKERIHYQMKIMQHFLREAGMIKANKVYLSGKVRTVSL

SEQ ID NO: 391 - protein, 344 aa, Paenibacillus polymyxa
  REGION 1..344: note = strain Sb3-1
MASRQSKALKNRPLTIVQVISNYPDAQPVPSIKGGTEKVVHELTEELVRRGHHVSLFAARGSRSSARLITYPKGLKHSQIPQYVLRHMPSGTHIIHDHTFRSAVARRKLPCSSLCTVHLPVKKHGKNPVYVSKRARQLMGGGKGFYIYNGINTHEYEFSSEKRGYLLFMGRIIPDKGVLQAIQVAERTGKRLLIAGPIKAPVFFRREIQKRIQRNPNIRYVGPVGGDRKQKLLKHAECLLFPSLWEEPFGLVMVEAMACGTPVLALKNGSVPEVLSGFPQLICKSVGQMARKAQQKNYPSPAQLRLYVNQRFTNKQMTSNYLRLYREIIRRREQKRGHRKPIRR

SEQ ID NO: 392 - protein, 157 aa, Paenibacillus polymyxa
  REGION 1..157: note = strain Sb3-1
MKRTSKKLWMGICFTMTLALSAGSFVVGSDTTHAASTSKADRIISKGSQYMGVRYEYGAPAGSTSSFDCSSFTQYVFAQNGIKLPRSSKQQSTVGTYVPRSQLKKGDLVFFYAPIHHVAIYMGDGKILHTYGKGGVTVTKLNSGWWNSHYTTARRVL

SEQ ID NO: 393 - protein, 458 aa, Paenibacillus polymyxa
  REGION 1..458: note = strain Sb3-1
MKLRTKITLLSSILVMTILLFVDVTVHLLFVKIATRNEREVLQNKWTEIISETGPTMILKNAWGPKLKDELSGDTILRVFDQQSRLLYEVSRQSRFKLDDIRFNLSQSSQLTDLQNHKILIIHLPVLSPEGSQKGTLEIVEKWDALENNLDILNTILITSTVGAMLLSLVGSTILANAILLPIASSIQTMQEIERSLKFKKIPVGSHNQDELSQMTATFNRMVERLEESFQSQQQFVSDASHELNTTLMIIEGYANMLRRWGTRDEDIRKESIESIYEETQRMRTMTQQLLTLASSQQQAPEPYEPVELVGCCQQVVAHLKPVHERQISIFTEEKEIWLDANLAKIKQLLVILLDNALKYSSDEIEIWISTDEKDVHLRVKDYGIGIPEGEIKRVFERFYRVDSSRHRKTGGTGLGLPIAKTITDAHQGTIRMESVEGEGTEVIVTLPQKQQKRLSLQ

SEQ ID NO: 394 - protein, 237 aa, Paenibacillus polymyxa
  REGION 1..237: note = strain Sb3-1
MDKSVLVIDDEEKISRLLQLELSHEGYVVEIAQTGREGLEKALAHTWDIIILDVMLPEINGVEVLKQIRKVDNHTPIIMVTARNTTPDKVSGLDEGANDYITKPFEIEELLARMRASMRNQLEPAATASPKEDKQQSKLQVDSLVLEPKTRSVVREGKRIELTPKEFDLLLYLMEHKNQVLHRDQMIQDVWGFDFVGDTNVVDVYIRYVRKKIDHGYKKKLIKTVRGVGYCIREEDH

SEQ ID NO: 395 - protein, 216 aa, Paenibacillus polymyxa
  REGION 1..216: note = strain Sb3-1
MLINVDFALFHWINELADHLAFLNGTMRFLAQYAPYLFGVALLIYWFTFKMPHRMMVLEAVITVCIGFIISWGLGHLFYRDRPFVGHSVIQLIHHDPNASFPSNHALGAFALAAILWLHHQKYRVLWVILAVLIAISRVWTGVHYPSDILAGALIGAGCAVGVHKFIRSRKFPGIFMQAAIILYEKWEQKLGLKPRSQTRTKMTESTSSVQIKSRR

SEQ ID NO: 396 - protein, 223 aa, Paenibacillus polymyxa
  REGION 1..223: note = strain Sb3-1
MKQLPTKLPISVALLTCIVCALGFSLIALWVSDHQVRHFDHKIITAIGQLESPAMTRLMKCFTMIGSGIPVVIIILIAMFVLYSVLGHRRELFFLAVAVLGSVLLNMVLKMLFQRARPEINRIIEANGYSFPSGHSMTAFSMYAALTFLLWKHVPSRRGRILLVVLSSLLILTIGASRIYLGVHYPSDVVGGYFMSGCWMAACIWFYQRYEERMLSLRTKSTA

SEQ ID NO: 397 - protein, 258 aa, Paenibacillus polymyxa
  REGION 1..258: note = strain Sb3-1
MENSTTTTEWYENQIREDGCFCMRSMQKAPGYVQKLNWTEKEFTQGLTYIQLRKDNKPVGFIEYALGEQAWRAVHADGYLVIHCIWIAVTGLGLGSQLIQRCIQDAITLGKKGVAVVTNIDTSWAPGPEIFLKNGFGHVEDAPYSFQLYVYKLNQEHSDPYFPDNWVLRLDRFSEGLTILRTHQCPYLEIATHNVIEAAETVGIQPEIIDIRDRSQLMELSPTPYGVFHVICNGELISYHRMTPRSFAKKLTMLYSKS

SEQ ID NO: 398 - protein, 277 aa, Paenibacillus polymyxa
  REGION 1..277: note = strain Sb3-1
MKRFKGFTFWGKQERILGLIVALAVVMLLSGCGANAAEINAQTPGFFNHYVVFPLSWLIQHLAQWFGGSFGLAIMTLTFIVRLALLPLMMRQTRAQQGMKRKMSAMQPDLDRIKKKYENKKDANSQQSMQQEMMSLYKEHQFNPLNIGCLPILIQLPILSGMYTAIRLTPELASHSFLWFRLGQPDWILAIVVAVVYLAQAKLSQLQMTADQRKQFAIMGYLSPIMMAVFSFNAPAAMPLYWTVSGTFLLLQSLWFRKRYPIEEAENKIKLGEVTPT

SEQ ID NO: 399 - protein, 106 aa, Paenibacillus polymyxa
  REGION 1..106: note = strain Sb3-1
MFELQDLLPYLLTIGLLCTVTYTYLAHLHGSVAECWVEGGPVRSHASPLMPISARGQDMPVRLARHIRRKEAPDEDASDCSPLLNDGTVNQRGGTYETIQGFHFLG

SEQ ID NO: 400 - protein, 368 aa, Paenibacillus polymyxa
  REGION 1..368: note = strain Sb3-1
MSMLDVLQGNRGLMPEHYKTLTVADMEQRVAELKQKWGSKLLIPGHHYQKDEVIQFADITGDSLQLAQMAAQNQEAEFIVFCGVHFMAETADMLTTDQQTVVLPDMRAGCSMADMANMEQTERAWKHLQELVGDTIIPLTYVNSTAEIKAFVGRHGGATVTSSNAKQVLAWALKQKERILFLPDQHLGRNTAHELGIPLDEMAVWNPMIDQLETERNPETVKIILWKGHCSVHEKFTVDHIRNVRERDKNIRIIVHPECSHEVVQLADCAGSTKFIIDTIRAAEPGTQWAVGTEMNLVQRIRQQYPEQQIESLNPDMCPCLTMNRIDLPHLLWAMEQIDRGEPVGVIRVDAQIRQDAVQALNRMLAIR

SEQ ID NO: 401 - protein, 384 aa, Paenibacillus polymyxa
  REGION 1..384: note = strain Sb3-1
MIYLDYAASTPMCDEALHIYSVMNKEMFGNASSLHDAGGQAAYTLDYSRQRMANMIGGHKEGIYFTTGGTESNMLVVQSILNGLPPHKKHWIMSALEHHSMYNLATFLEHQGYELTIVQPDREGRITREVLIPHLRDNTGLVSVQHANSETGLIQDLAALSPLLHERGIMLHSDAVQTFGNVHIDVEAMGVDALSISSHKVYGPKGVGAAYLKPGTPWRPVYPDTLHEKGFRPGTINVPGIAAFVAAAEMMTEQMEMHQERYATLRRYFITKIQERSIPLRWVVEESEKKAVLHHIVGCFFHGYEGQYVMLECNRSGVCISTGSACAAGHHDPSPAIQALGASGREALQFIRISFGRTTTIEELNVLVDILTDLTHQQERSLSR

SEQ ID NO: 402 - protein, 179 aa, Paenibacillus polymyxa; identical to SEQ ID NO: 9
  REGION 1..179: note = strain Sb3-1

SEQ ID NO: 403 - protein, 159 aa, Paenibacillus polymyxa; identical to SEQ ID NO: 8
  REGION 1..159: note = strain Sb3-1

SEQ ID NO: 404 - protein, 115 aa, Paenibacillus polymyxa
  REGION 1..115: note = strain Sb3-1
MASLGKNGNGNGNRKSKSPPNGQKKNGLNSNSAIFSALQGKNVEVLVAALLLTGKLNVDSVTLYRQATLFLGLTGKYKTLASAPTNVDNMVKFLNDNGNMTLDQVIQAFSQKINK

SEQ ID NO: 405 - protein, 1011 aa, Paenibacillus polymyxa
  REGION 1..1011: note = strain Sb3-1
MGIFRRFTSRSFKYATAMVFTLSLYAGVVGGIQPARAEGPADPAPFIAAKVVNENAGKKVLFDNTHGQTAGAADWVIDGGFSDFGQALANNGYDVHELRQSTPITYNDLKNYDVFVTAEPNIPFKQSEQAAMEQYVKAGNSIFFIGDHYNADRNKNRWDGSESINGYRRGAWEDPAKGMSEEEKSSTAMQGVVSSDWLGSQFGIRFRYNALGDITANQIVEPAQAFGITAGVSNVAMHAGSTLAIIDPTKAKGIVYLPKTNQAWGNAVDQGVYNGGGIAEGPYAAVAKVGLGKAAFIGDSSPVEDATPKYLREETGTKKTTYDGFKEQDDAVLLVNMVDWLSKKEEYTSLSDVKNLHLDQPTELLSFEDPQASTEPQAEPWSAPAAGYKWWDQRTFKAGSYGGSTASAQPVYSIVRQEQLPNVQPFQIRIVADQLAPNSTISGFSAGIYVAGGNQVAQIQNPDGSWPTSYGYSGTFSLESDSKGHAYRDLTVRIKPGTSGSANLRLRQNGSNLLTQSVVLADVPAQPLPEDGNTIPARISVAEARTLSAGKVVTLEGVVTTEPGAFGGQAFYMQDESGGIYVYQNQSGFHPGDRVKITASLALYNSEVELTDPVAIEKTGEGQLPQAVQVTELNDANQGQLVELPTAIIRNVIDATPVGSFEFDAVAGVVSHHVRIDARTGLTRTSFPYQEGQQVKLKGISAIFKGNYQLKPRGLDDFSAQTDATLQEVELSLDQTTFNVGDTAVTHLKGTLTDGSQADLSNASVQYSSSHESVALDTYGELRALKEGSAEITASVTLDGKTVVSNPVTVRVEKIAAGEVPGKPVLSHDNGQDTGLKDGDYNITMNLWWGTNGDELKLYENDKLIETQSLQAVSPGAQHAVISITGKSNGTYTYTAELINASGKTVSDPLTVEVTDASPGIPVLSHNNWDGDGDYTLTMNMWWGTNATQYNLYENGKLIDTQDLPSQSPQAQSAATNIQNQKPGTYEYRAELVNAAGEVSSQTISVEVKER

SEQ ID NO: 406 - protein, 633 aa, Paenibacillus polymyxa
  REGION 1..633: note = strain Sb3-1
MKNRGFYYLSAFLAALYLWNLLIASAWAADSITPNSVEKAVDDIMSTELEKLHTPGAAVVVTQEDHILFSKGYGYADLERKVAFDPAKTIVRVGSLTKSFSASAAMQLVEQNKLDLNEDVNRYLHSYKASQYQNHPFNLHQLLTHTAGLDEAIYDINSSTRAGVLPTEQYLSTYFQKQSPIRKPGIRYEYSNVAFGLIGNIVEQVSGQGLNDYLSTHLFRPMNMPSATLELPLNNPALAQSYQWKREAYLKQPFSYINLPGAGALNVTPNEFSHYLITHLNQGKYKGKAVLQPQTVKAMHAQQFAADARLDGIGYGFFRGQLETGVHMLWATGKIDGFISKMVLVPSQKIGIFVISNSADTDTLLHGKVINAIAQILPAEPQAASQSPVRSVKEIKLLPEIEGVYQLNLNPIHGWGKWLRMLGSVKYTVRIQDDHTLIVKGKFPDQNEASDKVFQAAGDGLFVEKGGQLKILLYQENSTWMMIAPDSETMKQTTFMHRTWTLLVSYAASSLFFITTLLIWMIRYVLRAIRKTNNHISSNLAYIALLNTIFLGVQVVYANNQMVYGYSAWFIWGICTLPLLSALIAVWVLIVNGAKLITGEKRTRAAGKIVFAVLTLLHTAYLYYWNFLPFHYS

SEQ ID NO: 407 - protein, 3748 aa, Paenibacillus polymyxa
  REGION 1..3748: note = strain Sb3-1
MKALFEKEKNYWSHKLESEDRIICLPYTNHVSRDTAATDSNCHTYTLTFPSEISQRISSITGGAPWAVFMVLLAGVESLLHKYTGEESVLLGIPVAKSGNGATKPINHLLLLKNTLDSSTTFKTLLSQIKTSVSEAIEHQNIPFWNYTEGLEILRNKDDKPLIHTTASLQNIHISDFLHHVQSELDFQFQWENAAVSLNVKYSSDRYDQVTIERFVEQLLRLYTVVLHQPELEICTAQVLSEQEVEQLVHTFNDTAVDYPRDASIHELFEIQAKQVPQQVAVVSGPNSLTYEKLNEKANRLAHFLRKQGIRTEQTVGIVAERSIEMIVGMLAILKAGGVYVPIDSDYPDERVRYLLEDSETKILLVQKMEHRPTDFKGIVLDLSDDAIYETDDADRCNSVLSYDNGMSTNTGNMGYVDCLNPLYSISASPELASTTTIPTEATQSEQAKPIQQVYAAEEQPKATAADRLAYIMYTSGTTGQPKGVMVEHRNVVRLVKHANYARLDADTRILQTGSVVFDASTFEIWGALLNGGQLVLVSQDVILDVLKLKEAVRSHGITTMFLTTPLFNQLSQQDLALFEGIRELLVGGDVMSVPHMNRVLKAHPSLRISNIYGPTENTTFSTVHAINGVQSESVPIGRPIHNSTAYVVDRSMQLQPVGVWGELLVGGDGVARGYRNRPDLTAEKFIDSPFRNGERCYRTGDLVRWNADGTLEYKGRIDAQVKIRGYRIELGEVEAQLLKLEVVREAVVTAHEDEQGQKQLCAYVVTHANAQLSELRSALSRELPGYMVPSYFVQLEQLPLTPNGKVDRRALPQPQGSISSGAEYVAPQNQLQAQLASIWKDVLELERIGIKDNFFEAGGHSLRATNVISLIHKELHKNVQLKDLFQHPTIEQLAQVIEALEQTTYESIPVSGNKPFYAVSSAQKRMYILNQLDGAGTSYNIPGALTLTGSLDYKALDNAFRQLINRHETLRTSFESMNGEPVQRVHDEVPFRVELIHAHGADQKETDELVHGFVQPFDLAHAPLFRAGLIETGPEHHILLLDMHHIISDGTSINVLIQDFIHLYAGDTLPSLRIQYKDYAAWQQEQQQSERYQEQENYWLNTFAGELPVLDIPTDYPRPAVRSFEGDVLEFTLDQRQSEGLKGIAMQTESTLYMVLLAAYTTLLSQYSGQEDIIVGSPIAGRPHADLSSLIGMFVNTLAIRNYPEGGKTFRDYVLEVKDNALKAFEHQDYPFEELVEKLGVDRDLSRNPLFDTMFALQNLEQTEQQLAELQLAPYPSEQTTAKFDLSLFAQEDGEQIACGFQYGTRLYKRETIERLAVHLQQLINVVIEQPEIALAAIEMVSAQEKEQLVEQFSTTAADSPYPRDQLLHVLFEEQVAQSPDRLAITFADTQLTYRELNERSDRLACVLTSHGIRRGSGAQIQRVGIVAERSIEMVVGMLAIMKAGGAYVPIDPEYPEERIRYLLEDSGAELLLSQRREQISFEPGIPVIDLSDAQLWSSEFEGYTHTHESASITNGGSALDLSHVIYTSGTTGKPKGVMVNHRNVARLVKGNSYATLDENTRMLQMGAVVFDASTFEIWGTLLNGGQLYVVNHDTILDAAKFKQVMNKYRINTMFMTTALFNQHSQQDIEVFASLKELLVGGDVMSVPHVNRVLKEYPQLRLSNVYGPTENTTFSTTYEITEPQTQGVPIGRPIDHSTIYVVNRSLKLQPVGAWGELLLGGDGVALGYLNRPELTAEKFIESPFRPEEYCYRTGDLVRWRADGVLEYKGRMDEQVKIRGYRIELGEVETRLSTIAGVKESVVTVRQDDSGQKQLCAYFVTDSELSASDLRSVLSQDLPSYMVPSYFVQLSKLPLTLNGKVDRRALPAPEPNVDTGMDYVAPETDVQLALAAAWGAILGIQKVGTQDNFFHLGGDSIKAIQVSSRLFQAGYKLEMKDLFKYPTIAGLSTYIQPVKRVAEQGEVTGHVVLTPIQRWFFEQSTDEPHYFNQSVMLYRQEGYNERALRLALHQITAHHDALRMTFRSSENGYTAWNRGVGEGEPYHLECFDYRDSEVIEENLEKMIEAKCNEIQSSISLSEGPLMRLGLFRCPDGDHLLVVIHHLTVDGVSWRILFEDLATAYEQAAKGEQVIQLPHKTDSFQTWAEKLHAYANSPAMERERAYWEGIAQAKPAPLPQDYGHNEHDKPLIGDSESVTALWTHEETEQLLKQANRAYRTEINDLLLTAVGMALQAWSGHDRFLINLEGHGREAILPEVDITRTIGWFTSQYPVLLDMPKETALSQRIKHAKEGLRSIPQKGIGYGILKYLAEVSPALCEVDPEISFNYLGQFDQDMKGNDLQSSPYSGGMPLSPTMARTYTLDFGGIISGGQLGLTISYSRTSYRPETIERLASLLESSLREILKHCIHKEHPELTPSDISYKGMRVEELDSLLSEMGATGEIDNVYTLTPMQKGMLFHSQLDSQAAANDAYFEQVSYDMQGQLDIHAFAESLNTLVRRHEALRTHFYFGRDTEPLQVVYRNQDCGFYYEDLRELDSDTRDTQLTNFKLQDKARGFDLRRDVLLRVAILRTGEDRYHFVWSFHHIVMDGWCLSLVNKEVFESYAALRERRVPELAPAVPYSRFIEWLEAQDRNAATDYWSSYLSGYEQQTALPAVKSGRKSEGYMASDWMTDWEHELALRVEETAKRYQVTMNTLLQTTWGILLQKYNNHSDVVFGSVVSGRPSDIIGVEDIVGLFINTIPVRIRSEAGETFAEVMKKMQEQALASHAYDTYPLFEIQALTDQKQNLINHIMVFENYPVDEQIEEMGSDGQELLSVSNVTATEQTNYDLSIVVMPGEGIKIRFMYNALCFDQADIERLHGHFVHLLEQILLNPNVCVEELELVTALEKQQIIGEFNDTALAYSYNQTIQKRFEEQVERTPDHIAVVWGQQSLTYRELNERANRLARTLRAKGVKPDQSVGIMVYRSLDMIVGIYAILKAGGAYVPIDPEFPADRICFMLEDSGAKLVLTQSHLAEQASLSFDGQVLVLDHEDIYHEDGSNLEPLAGPHHVAYVIYTSGSTGKPKGVMVEHHSVLNRILWMHDRYGLSAEDTILQKTAFTFDVSVWELFWWSMVGSKVSLLSVGGEKNPEEIVDTIARDGVSTMHFVPAMLHAFLEYVEQQPREAMQAKLGTLRHVFASGEALPPQHVARFQRLVSSLAGAKLINLYGPTEATVDVSYFDCEPDEEYAVIPIGKPIQNIRLYIVKEGTEQLQPIGVAGELCIGGVGVARGYLNRPELTAEKFVKDPFTGGKAGYERMYRTGDLARWMPDGNIEYLGRIDHQVKIRGYRIELGEVEARLASVPLVRDSVVIALQDGIGQQQLCAYFTADEQLTVREIRAVLLGSLPSYMIPSVFVQMERIPLTANGKIDRKALPTPDTALRTGIEYVAPRTDVEQLLAAIWQEILDIPQVGIHDDFFTLGGHSLKVLELIRKVHLATNIELPIRSVLEFPTIEEQALTLLKADLEYKADSPIIRLNEHGPVSIFCFPPMLGYGLSFAELAKQLDQDAVVYGLEFVDDAADEQAMLARYVDLIVSTQAQGPYVLLGYSIGGNLAHKVASTLERQGHAVSDIFMLDSVKRTEALPFTDEETEQEIHAMLEQVPESYRELLNETYQRKMIAYAVYGNQLVNTEKVQANIHGFDAVGSETVKGTGDNRLLWKDATQGSYEEHSLIGNHYELLEPGFIEENVKGIRAAIQKITRNMDKGMAQGLTHHNS

SEQ ID NO: 408 - DNA, 42398 bp, Paenibacillus polymyxa
  source 1..42398: mol_type = genomic DNA
  misc_feature 1..42398: note = strain Sb3-1
atgacacagcaagatgttcaattgttttccttaagccagccacagcaacgtatttggtacacggagcttttgtatcctcatcggaacacttcaaccattattgctactgtaaaaatcagaggaactgttcgtatagatgcattgcagcaagcaatgaaccgggtgattgcccaaaacgattctttccgtatcaaaatcactgctcaggatggaatcccatatcaatatgtagagccgtttacagcggaaagtattgaaacgcttcaagtaaccctggaagaagcgaatgaatggttaaagcgccataatccacagccgttctcattgttgaattcgcagctgtaccgatttgttattttgcagttaggggcagaagaaacctggtttaattttaaaatgcatcatattatttcggacggcgtgtccatgaatcaggccattaatgaaatcactggacattatatggatattgtgcacggtacaggacaggatgcatcaaccaaaggcaattcttatctggattttattcaggtagagcaaagctatgagcaatctgatcgctatcaaaaggacaagacgtattggacggaaaagtttgctgatttgccagagaccacaggtttaaaatcatataacccgctgacactgagcacagctgcacgccgggagagttttatactggaacatggattgtatcgtggtgttacggctttttgcgaggaacataaaatcagtattttcacgttcttcctggcggctctgtatatttatttgcataaagtgacgggtgagcaggacttaaccgtaggaacactctatgccaaccgtacgtctaagaaagaaaaggataccatcggcatgttcgtcagcaccgtggctacgcgtctgttggtcgaaccggaatccgaacttctggccttcttacagggtgtagggaaggagcaggcgtccattttgcggcatcagcgttacccatacaacaaaattattcaagatttacgtgaacagcaaagcagtctggacatccagcgtctgtttggggcatccattcagtaccgtacattgagtttctcccgttttgatgaagcgattcagcaggtggataacgatttctgcggagatacagtgaatgacttcgatattcacatggttgaaatgctggatgacgatagactcgtattatacctggattatcgtaccgagctgtttagtgagcaggaaattgctcgaattattcgacaatttttgagtgtggcggagcatatggtacaaggcccacacaagcgaatacaggaattgtcgctgatcagtgaggaagaacgggcggaaatcgtcgacgtattcaatgctacagcagtggaatatccacacgaagcaggcattcatgagctgtttgaggaacaggcggcacgtacaccgaatcagacagcagttgtgtctggcaatgcctatttaacttatggcgaattgaatgtaaaagccaatcgactggctcacacgctgcgcgggcacggtgtaactgccgagcgaactgtcggtatcgttgcagagcgttccgcagatatgatcgtcggtatgcttgcgattctcaaagcgggcggcgcatatgtgccaattgaccctgattatccggctgaacgtgtgcgctacctgctggaagattcgggagcggagttgctgctggtgcagaatgtggaacagcaaccggaggattacactggaattgtgctagatctgagagatgccgctgtgtacggggcaaagaataaccaagacgtgaataacatacatggggaacaaaacgaagctagtcatgcagattttacccattatttaaatctgaaaaatcagaatttaaaagaatcttcttcgtctgtcgtagacagtactactggagcacatacatttggcaatcgactagcctatcttatgtacacttcgggtacgaccggacagcctaaaggagttatggtagagcatcgcaatgtcgtgcgtttggtgaaaaatacaaactatgcgcaactgggtgctgacacgcgcattttgcaaactggtgccgttgtctttgacgcgtccaccttcgaaatttggggtgcgttgctgaatggaggacagcttgtactggtaagtcaggatgttattttggacgctccgaagctcaaggaagctatccgcagccatggtattacaacaatgtggctaactgcgccactctttaaccagctatcccagcaggatctggagttgttcgagggggtacaagaactgctggtcggcggtgatgtgttatccgtaccgcacattaaccgggtgctggaggctcatccgtccctacggattatcaacggctatggcccaacggaaaatacaactttttctacaactcatgcaattgctggcgtgcaatcggaagcggtgccgatcgggcgtccgattcacaactccacagcgtatgttgtagatcgttccatgcagcttcagcctgtgggagcatggggggaactgatcgttggcggcgacggggtggcacgtggctaccggaatcgtcctgatttaacggctgaaaagttcatagacagtcctttccgcagcggtgagcgctgctaccgtacaggcgatttggtgcgctggaatgaggacggaacgttggaatacaaaggacggatcgacgcacaggtgaaaatccgtggctaccggattgagctgggcgaggtggaagcgcagctgttgaagctggaggcggtgcaagaagctgtggtcattgcacgtgaggatgagcagggacaaaaacagctctgcgcatatgtggtcacccttgcggatatcacagcaagtgagctgcgaagcgacttgagtcaggagttgccgggttacatggtgccgtcgtattttgtacagctggaacaattgccattgacaccaaatggcaaagtggatcggcgtgcgttgccgcagccggagggaagcgtggattccggcgaggattatgtagccgctcgtaatgaggtagagcggacattggtatcggtatggcaatctgtactgggtatcgaacagattggtgttctggataacttttttcatttgggcggcgactcgatcaaggccatccaggtgtcttcaagactgctgcaaaatggttacaagctggaaatgagggagctgttccagtatccaacgattgctgagctgaatggacgggtgcagagggtgacccgcgtgtccgatcaaggagaagtcagaggaaacgtggcattgacaccgattcagcattggttcattgaacagcagccatcccatcctgaacactataaccaagctctgatgttgcaccgtgaggatcgtttggacgaaacggcgcttcatcaagcactgcaacgcattgtcgagcatcatgatgctttgcgcatcgtattccgccagaatgcagacggtggttatgaagcatggaaccgtggcgtgcaagaaggagagctgtatagcctcgaagtgatggattataccacggagtctgactttgctcatttgctggagaacaaagccagcgaaatccaaagcagcatccgtctagatgaaggtcctctggtgaagctgggtctgttccgttgcatcgatggagaccatttgctggtggcgatccaccatttggtggtcgacggcgtgtcatggcgtattttgctggaggatctggcatccggctatgagcaggctttacggggcgagtctgtccgcttgccgaataagacggattccttccgcctgtgggcagatcaactggcagcttatgcgaacagcgccgcgttggagaaggaacgtgcgtattgggagcaggtggagcgaactggtgctgctcaagaggcattgcctaaggattacactcgtaaatctcaggccaagccacagcttcgtgatgatcgaacactgaccgtagcgtggacggtcgaagaaacggaacaattcttgaaacaagctcatcgggcctacaatacagaagcaaacgacctgctgctgacagctttgggcatcgccattcaggagtgggcaggcatccgtcaggtgcttgtaaacttggagggtcatggacgggaagccattttgccggatatggatattacgcgcacggtcagttggtttaccagccaattcccagttgtactggatatgggcgaggaccggaatgtgggacagcgtgtcaagaacgtcaaggaagggctgcgccgtttgccgcataaagggattggatacgggattttgagatatcttgctgacggagaagggaaagcagcttttgttgccgagccagaaatcagctttaactatctcggacaattcgatcaggatttgaaaaataatgcattccgcatgtctccttattccatcggggcttccatgagtgacacattgaccaagcggtatgcgctggatatcaacggcatgatcacagacggcgcactggaactgacgatcagctacagcaacaaaatgttcatgaaaaaatcaatcaaaaagctggctgatttacttcaggagagtttacgtgaggtattggctcactgtgtggccaaagagttgccggagctgaccccaagcgacttgtccttccgaggactgacggccggagagctggatcatattgtagagcagacggctactgcgggagaactggaaaacatttattcgttaacacccatgcaaaaaggcattctgttccacggcttcatggagccgcaatccggggcatattttgagcaggcgacatttgatctacaaggcagctttcaagtggagacttttgccgaaagcctcaatcaactggtggatcgccatcaaatattcagaacgaatttttatagcggctggaatgaacagcccttacaggtggtgtatcgacacaaacatgcggggttccgttttgaagatatacgcttgatgggacaagaagagcaggacgcatacattgctgattttgctgagcgcgacaaagccgaaggctttcatttcagctcaggcgagctgatgcgggtgtctattttacgtacaggcgaggagtcgtaccgttttgtgtggagcttccatcatattttgatggacggctggtgcttgttcctggttgtaggggaagcatttaatacgtactttgccatcctcgaagaccgcaagccggagcttgccccggtaacaccatacagcgaatatattgaatggctggatcggcaggacaagacggaggctgaacggttctggcgtgattattttgcgggctttgagcagcagacggtattgccgcaggtcaaacagctggatggtcacgctaaagcatatgaagcggacaagctttcgtttacactgggccgtgaagtgacggagcggatgaacaagctggttaagcagaagcaagtgacggtcaacacacttctgcaagcagcgtggggcgttgtgctgcagcggtataacaacagccgggatgtggtatttggcagtgtcgtatctggtagatcagccgatattccgggcatagacaaaatgattgggttgttcattaatacggttcctgtacggattcacagtgagaaagatatgacatttgctgggctgatgaagcagatccaggagcaggcactggcttcccgtgcctatgaaacctatccgttgtatgacattcaggccctgaccgagcagaaacaggacttggtaaaccatattatcgtgtttgaaaactacccggtggaacagcgcatggagcagatgggtagccgtggcgcgaatggctttacgattgccaatgcttccatgtcagagcaaacgaactatgatttcaacattacggttgtgccgggtgatgaaattcatttccatttggagtacaacgcgaaggtgttggaacgtgcagctgtagagcaaatccgtgagcatttgctgcatatgattgaagaagcgattcacagaccagatgcacgggtagatgagcttcaattggtgactgctgcggaaaaagcaaaaatcatcgatggttttggatcagtaggcgtagctgcgtggactgatgaaaaagaatctaatttgttgttccacgcctatgtggaagaacaggcacagcttgtgccggatcacgtggccgttgtatacgaggaacggcagtttacgtaccgcgagctgaacgagcgtggaaaccagcttgctcgcagattgcggaatgagggcattggacgcgagtccattgtgggtattttgagcgaacgctcggtagacatgctggtcggtgtattggcggtctggaaagcaggaggcgcatatgtgccgctggatgcggattatccgtccgaacggattcgctttatgctcgaggacagtggtgcgacggtgctgctaacgcaaaccggtttgcaagagtgtgcacaggtttggctggaggcaagtcggcaggccttggtcggagggcagactgagggtgaattgaaaacagcggctggcgctgaaacgatggaaagagacagcctgagtgaaggcataagcttgaaattagattcgaagtctgacagcgaagaagcatccaaaccagcaaccgggctgcgtctgcataccgtattggcattggacgatgagtcgctgtacaccggggatgccacggatgttgaacctatcaatgaaccacacgatttggcatatgtgatctatacgtccggtacaaccggacgtccgaaaggcgtcatgatcgaacatcgcagcttggtgaatacggctgcggcgtatcgccgggattaccgtctgaaccagttcccggtacgactgttgcaactggccagcttttccttcgacgtgttcgtcggcgatattgcacggacgctttataacggcggcacgatggttatctgtccgaaagatgatcgcattgatccaagccgtttgtacggatggattcgtgattatcaaatcacggtgttcgaatcgacaccagctttgatcgtaccgtttatgcagcatgtgcatgaacaggggctggacatgagcagcatggaactgctgatcaccagctcggatagctgcagcgtgacggactaccgggtgctgcaagaacggtttggcgcagatatccgcatcatgaacagctacggcgtcaccgaagcggcgattgactccagcttctatgacgaagagctatcgaagctgccaagcagcggccatgtgccgattggtcaagcgtggctgaacgcacgcttctacatcgtggacagccagctgaatccggtgccgatcggtgtactgggtgagctgtgcattggcggtgctggcgtggcacgggggtacctgaaccgtgcggacctgaccgccgagaaattcgtagcgaacccttacgtaccgggggaacgtttgtatcgcacaggcgatttggcgcggtggatgccggacggtaatgtggactttatcggccggatggactaccaggtcaaaatccggggctaccggatcgagctaggcgagattgaaacggcgatccagcgagtgccaggtgtgcgtcaagccgtagtcatcgaccggacggacgagcgtggaaacaaatatttgtgcggatacatcacgggagaaaccgaactgcggatcgaggaagtacagaccgagctggaagccggactgccagcgcatatggtgccagcacgtctgatgcgactggaggccatcccgctgaccagcaacggcaaaatcgaccgcaaggctttgccggagccagaaggcagcatccatacgggagcagcctatgtggccccgcgtacccaagtggagcaagtactggctgcggtatgggctggggtgctgggcgtggaagccgtaggcacgcaggataacttctttgagctgggcggcgattcgatcaaagccttgcaagtctcgtcccgattgctgcaagcaggttatcgattgaacatgaaggatctcttcagtaatccgaccgtaacggcactcagtcctttgcttcgtacagatggcaagatggccagtcaggaagaggcagtaggcccggtggaactgacacctattcagcgatggttcttcgagcagcagccggctgacctgcaccacagcaaccaggcgatgatgctgtatcgagctgggcgctttgacgtcgacgcgctgcgccgtacgatggaccgtatggtccagcatcatgacgcattgcgcacggtattccgtgagacggggcagggctatgtcgcttggagccgcagtgtagcggaaggcgagctatacacgctggacattgtagatttcagcgcagtggaagacgaatccaccgctgttgaagccaaggcgagtgaaattcaagcgagcattcatttgagcgagggtccacttgtgaagcttggtctgttccactgcgctgagggcgaccatttgctaatcgtcattcatcatttggttgtggacggtgtatcgtggcgtattttactggaagatttggcatccggttatgagcaggctgttgcaggtcaaaccggcacagcgatccgactgccgcataaaacagattcattccaggtatgggccaaacagctgtcagcctatgccagcagtgcgacgatggagcgggagcttgcttactggcagcatattgaacaagcagaagctagccttgcgaagcctttgccgaaggattttgcaaatgacaatgctctgcttggagacagtgaggttgtgacggtccgctggacgaagcaggaaaccgagcagctgctcaaacaagctcatcgcgcgtacaacacggaaatgaatgacctgttgctggctgcgctcggaaaagcagtctatgactggtctggttccgaacgggtgctggtcaatctggagggccatggacgggaagccattgtaccggatgtggatattacacgcacggtcggctggtttacgagccagttcccggttgtactggatggaagtttgggacaagggggacataccgctcgtctgatcaaaaggatcaaggaagggctgcgtcatattccgcaaaaaggcatcggctacggtattttacgatacctgtcggatatgaatatgctggagaaagcaggagtgcggttacaggctcagcctgagatcagttttaactacttgggccaattcgatcaggattataaaggcaatgatctacagccttccgcctattctatcggtgtgcctgtcagcacgaacgcgactatggattttgcgctggatatcaatggagtaatcgaagatggcgagttgatgttcacgattcgctacggcacaacgcagttccgtcatgaaacgattgaacggcttggagagctgttggcatccagcttgcgtgaggtgattcatcactgtgttgcccaagaaagaacgatgctaaccccaagtgatgtcctgttgaaccatgtaacgctggatgagctggagcaattggtggaagatacgcgagatctgggcgagctggaaaatgtgtatgccttgacgccgatgcaaaaggggatgctcttttacagcttgatggatgagaattcagcggcttattttgagcaggccacctttgagttgaacgggcgttttgatgtggttactttcggtaaaagttttgatttgctcgtacagcgtcatgaggcattgcggacgaactttatcagttcatggaaggacgagcctgtacaggtcgttttccgcaaccgtagcggacaattatattatgaagacctgcgcggactggaaaaagaggaacgagcagctcgtgttgaagcttttgtcatcgaagataaagcaaaaggattccatctggcagaggatgcactcattcgtgtttccattttgcaaaccggggatgaaacgtaccactttgtttggagcttccatcacattttgatggatggctggtgcttgtcctttattacacaggaggtattcggtagctatctggcactgcgcgcgggtcatgagccagcgctggagccagtcacgccgttcagccgatttatcgaatggttggagcgtcaggaccgtgaggcggccttgcaatactggagtgggtatctggcggactacgagcagcaaattacgcttccacagcaaaaaacacagtcgaaatctttacaatccggggagtatgtcgctgaagatctggaatgtaacttccagccagagctggttgctcagatcgaacgggtggcgaagcaaaatcaggtcacgatcaatacgctgattcagacggtatggggcgttctgttgcaaaaatataacaacagtacggatgtcgtgttcggtagcgtcgtgtccggtcgtccaggggatattccaggcgtggagcacatgatcgggctgttcattaataccattccagtgcgtgtgcagtctgaacaaggtgaaacctttgtcgagctgatgaaacgaacccagcagcaggcgctggcttccaatgcctacgatgcattcccgttgtatgaaattcaggcgctgaccgagcagaaacaggatttaatcaatcatattatgatatttgaaaattatccggtgggacagcaggtagaacagttaggtagcgagggacaggataaatttacgatttcgaacgtggtggctacagaggaaaccaactacgatctgaacgtagctgttatgccgggagaaggcatcaagattcgctttatgtataacgcgctcagctttgatcaagcaggtattgagcgtctgcatgggcatttagcacgcctgctggagcaaatttcgctcaacccgcatgttcgggttgaagagctggaattagtcacagcagcggaaaagcagcagattacaggagcgtttaatgcgacggcttcagcatatccaagccatcagacgatccaaaagctgtttgaggagcaggctgaacgcacaccagatcatgtagctgtcgtttgggagcatcaatccttaacctatcgtgaactgaacgagagagccaaccgtcttgcacgcaccttgcgcacagaaggagtagaatcggaacagccggtaggcattctggcgcagcgctcgctggacatgatcgtaggcatctatgcgatccttaaggctggcggagcttatgtaccaatcgatccggaatatccggccgaccgcatccgctttatgctggaggattcgggagcgaaactcgtgctgacgtcatcgcacctggccgagcaagcatcgctgagtttcgacggccaggtgctggtgttggaacgcaacgacatctaccacgaagatagctccaacttggagccgttgtcggggccacatcatgtcgcctatgtgatctacacctccggttccactggaaaaccgaaaggtgtaatggtggagcaccattccgtgctgaaccggattttgtggatgcatgatcgctacggcttgagtgcggaggatacaattctgcaaaaaaccaccttcaccttcgacgtgtcggtgtgggagctgttctggtggtcgatggtcggctcgaaggtgagtttgctgtcagtcggcggggagaagaacccggaagacatcgttgacacgattgcccgtgatggcgtgaccacgatgcactttgtacctgctatgctgcatgcgttcctggagtacgtggagcaacagccacgggaagtgatgcaagcgaagctgggcacgctgcgccatgtctttgccagtggtgaagccttaccaccgcagcatgtggcgaggttccaacgtctcgtgtcgagcctagcaggagcgaagctgatcaacctgtacggcccgacggaagcgacggtggacgtatcgtacttcgattgcaagctggatgaagaatatacagttattcccatcgggaaaccgattcaaaatattcgtttgtacatcgtgaaggaaggcaaagagcaattgcagccgattggggttgcgggtgagctgtgcatcggcggtgtcggcgtagcccgcggttacctgaaccgaccggagctgacggctgagaaattcgtagccgatccgtttgctggtggggaagcaggctatgagcggatgtaccgcacaggcgatttggcgagatggttgccagacgggaacatcgaatatttgggacggattgaccatcaggtaaaaatccggggttatcgaatcgaactgggcgaggtggaaacgcaactgctccaggtggaatcggtacgagaagccgtggtcatggctcgtgcggatgaaacgggccaaaaccaaatggtggcctactatgttgcggggcaagaactcagtgccagtgagctgagaagtgagctgggccgagaactgccaagctacatggtaccatcctactttgtacagctggagcagatgccactgagtccaaacggcaaaattgaccgcaaggctctgccggtacccgaaggcagtctgcaaagcggagcggagtatgtagagccgcgcactggagccgaacgggcactcgtagcaatctggcagtccgttctgaacgtacaaacggtcggtattttagacaacttctttgatctgggcggcgactccatcaaggcgattcaattctcttcccgactgcttcaagccgggtacaagatggatatgaaggacttgttcaaatttccaaatgtgaaggagctggctccgcatcttcggttagcggacaagcaaacgaccgagcaaggcgaggtcacggggaaagtggcgctaacgccgacccaatactggcttgcagaacaagggcaagtgcatgcgtatccatttaaccaggcggttatgctgcatctggagcagggctttgacgaatccgctctacgtcaggcgctcatgaagctaactgagcaccatgatgcattacgtatggtgttcagaaagacggagcaaggctatgaagcatggaaccgtggagtacatgagggcgaattgtatcatctggatgtattgaactttagagatgtcactgatgaagccttgcttagtgcgacgattgaggcgaaagtcagcgaaattcaaagcagtatttatgtgcatgaaggcccgctatttaaagctggtttgttccactgtgcggatggggatcatttgctcatagccatccaccatttggtggcagacgggggatcgtggcgcattttgttggaggatttagccacagtctatgagaaagccgtccatcaagaagtgcttcagttaccggataaaacggactcgttccgttcctggtctcaaagactgtacacctatgcgaatagtgcagcactggaaggcgaacgcgcctattgggagcatctgaacgcatccgctttggctgaccaggtacgcttgcctgaagatcaagcacaggatggcaaatttatcttggctgacacgggtaaaatggtcgttaagctttcggaagaagagacagaacggctattgaagcaagcgcaccgcgcatataacacggaagtgaacgatctgctgctgacagctttgagcatgatgctgtacacatggaccggtcatgaacgtagcctgatcaatttggaaggatatggacgtgagggcattttaccagatacggacctttctcgtacggtaggttgctttacggttcaatatccaatatggctgaacatcggcagtgattctactttatcgggacgcatcaaacaggtcaaagagagtctgcgtgatatcccgaataagggaattggctacggaatctggagacatttgaatgaatctggccaagccacgggtcagcaagcagatgcactgaatctcggtcaacatcaagcttttgccgagccacaggtaagcttgagttatcacggacagtttgatcaggagttgcaaaacagtgatatccgtatgtcaccttactcgattggatcggtcgttagtggtcagctggagatgaaatacgatttcattgtggacgcgagtgtaaccaacggtatcctgaaactggatattcgatataacagcaaggtctttcgtaaggacaccatccaaatgctggctaacctgctaaaagccaatctgcttgaaattatcgagcactgtgttgcaagggagcagaacgaattgactccaagtgatgtactgtttaaaggtctgaccttggagcaattagatacgattaaggagcagacaaagacggttggggaattggaagacgtgtacccgctaacgccaatgcaaaagggtatgctgttccatagtttgatgaatacacaaaccgaagtgtattttgaacagttgacgtttgatcttgaaggagagtttgaaccgagcatgtttgaggaaagcgtgaagctgctcgtaagccgtcatgcaattttccggacaaatttctacagtggctggtatggtcaaccgttgcaggttgtctatcgtcataaaaatccgagcttccgttacgaggatgccagagggcgtgaacacactgtagctgaatttgtgactcaggacaaagctcgaggctttgatttaggcaaggatgcgctgatgcgtatagctgtcttccgtacaggggattgctcataccgatttgtatggagcttccatcatatcctgatggacggctggtgtctgtcacttgtcatggaagaagtgctaagtgcgtattcatctttgatgaagaacaggcagccggaactaccacctgtcagaccatatagccgttacattgaatggctggaacagcagaaagcgcaggaagcggctcgctattggagcgactatttggcgggttatgagcaacagaccttgttacttggtgagaaagcgcaggcttctgtaacagtgcagaatgaggatgcagacggaagtgacgggcgttcggatacaggctatgttttggagaaggtgacctttgggttaggtaaagagcggagtaccgcattgaagcgtattgcaaagcaacagaaagtaacaattaatacgattttacagagtgcgtggggtgttattttacagaaatacaataataatcaggatgtcgtgtttggtagtgtggtatccgggcgtccggcagaagtcgcaggcgtggagagcatgatcggtttgttcattaatacaattccggtacgcatttacagtgagcggaatgcaacatttgctgaaatattaaagcgtacacaggaacaggctttgacctccggtccatatgacacgtttccgctctacgatattcaggcgctaactgaacaaaaacaagacctgattaatcatattatggtctttgaaaactatccgatcgggcaaaagatatctcaggcgattgattccggcgaagcagacgcacatacaggcttatctatagccaatgtggcaattgcagagcaaaccaactacgattttaacctgattgtcgtgcctgacgaggatatcacgatcctgctggaatacaatgaactggtatataaccggtccgaaatgcagcgcatcaagggtcatatcgagcatgtcattaggcaaattgtggagaatccgaatatccgtgtgagtgagttggaattgataacatcggaagaacaagcgcagattattcaggtttggggcgatactgcaacagcttatccacaggatcagacgttaagtgcggtgttcgaggaacaggtggcacagacaccggatcaggtagcattaatgtttggacatcagagtctgacttatcgggagctgaatgaacgagccaactcattggcacgcatacttcaagcacagggggtaggacctgataagctggtcggcctgatggtgcatcgctcagtggaaatgatcgtaggtctgctggccgttctaaaagcaggcggtgcatatgtgccaattgatcccgaatttccgtcatctcgtattcaatacatgctggaagatagcgaggccacagtgcttctgaccagtcgtgatctgttggaagagcaccattgcaacgccaatgcaatatttattgaggatgcagaattgtatcaaggagaaagcagcaacctggaggcgattgcccgcccagagcatttggcttacgtcatctatacctctggttcaactggaaatccgaaaggggttatgctccagcatcgctcagtactcaactttattacaggtatgcgcgaagcaattgactttgaaacgagtcaaaccattttgtcactgacgaccatttcattcgatatttttgtcttggaaaccatcctgcctctgctgggtggcatgacggttgtgcttggcgaccgccagcatcaggtgaatcctcaggcacttggtgagttgattactcatcatcatattgagatgttgcaaatgacaccatcgcgggtgcaaatgctactgagtcatgaaacaggttcccacgcactgcaaagcgtgaaggcaattatgatcgggggtgaagctctaccgtccaagctgttgggagatctgcaaaagataaacggtcctcgcatttacaatatgtacggacctacagaaacgacagtttggtcgactgtacaggaactgacccatgctcatcaaattaatatcggacgtcctatcgcgaatacccaaatatatatcatgaacgcggatgggggattgcagccaatcggtgtgccgggcgaattatgtattgcaggggaaggattagcccgtggttattggaaacgcgaagaactaacggccgagaaatttgtagagaacccgtttgccggaggcaaagcaggctatgaacggatgtaccgcaccggcgatttggcgagatggatgccggacggcaacattgaatatctgggccggatcgatcatcaggtgaagatcaggggttatcggattgagctgggcgaggtcgaatcgcagctgctccaggtggaatcggtacgcgaagccgtggtcgtggcccgtatggacgaaatgggccaaaaccacatggtggcctactatgtcgcgggacaagtagtcgaggccagcgagctaagaagtgagctgggacgggagctgccaagctacatggtgccatcgtactttgtacaactggaacagctgccactaacaccgaatggcaaaatcgaccgcaaggccttgcctgcaccggaaggcagcctgcaaactggagtcgattatgcagagccgcgcactatgcaagaacgcgctctggtagccgtctgggagtcggtactggggctgcagacggtcggtattctggacaatttcttcgacctgggcggtgattcgatcaaggcgatccaaatcgcctcccgtgcgttccaggctggctataagctggacatgaaggatttgttccagtatccaaccattgaagccctggcaccgcatatgcacgaggtccgtcgtatggcagatcaggaagaagtcagcggggaaacggcgctacttccgatccagcattggttctttgcgcaggagcgcgagcgtccacagcactttaatcaagcggtcatgctctatcgcgcggagggctttgaggagatggcaattcgccaagccatggatcacctcgtgaagcatcatgatgcgctgcgtacggtattccatcagacttccgctggttatacagcttggactcgccatgtagaggaaggcacattatatacactggaaatggtagattaccgtgaacgggccgcttatgcggaagcgctggaagcgaaggcaacggaaatccaaagcagcatggacctgtccgcaggacctttggtgaaactcggatggttccgcacagcggagggcgaccatctgctgatcgccattcaccacttggtggtggacggggtgtcgtggcggattctgtttgaagatttctcgacaggctacgagcaggcgatccagggcgagtccgtacgattgccctataaaacagattccttccaaaaatgggcacgggagttgtcctcttatgctaaccgtcctgaggctgcatcggatgaagtctattggaagcagctggaacaggtcaaagctgaagctgcaccactgcctaaggattttgcctacgagggctccgtgaatgcagacggcgaagtgctaacggtggagtggactgaagctgaaacccagcaactgctgaagcaggcacatcgcgcctataacaccgaggtcaatgatttgctgctgactgcgctgggactcgcggtgcaccactggacaggcgcaggccatgtactggtgaacctggagggacacggccgggaaacgatcctgccagaggtggatattacgcgtacagtaggctggtttacgagcttgtatccagtgctgctggagaccggcaaagaaatgacactggctcagcggattaaagaaacgaaggaaggcctgcggcgcattccgcataaagggctgacctatggcacttggcgttacctgtcctctgcgttgcctgcagatgaaatggatacgatcgcagccgaaccggaaatcagctttaactatttggggcaggtcgatcaggatctgcaaaacagtggaattacgttgtcctcctaccgtgcaggggagacagaggatgcccattcaccgcttgccatacacgctggatttgaacgcaatgatctcagaaggcaagctgcgcttgacgatcgcttacagccgtaagcagtatcgtaaagaaacgctggaacaggtggcggggctgctgcaatccgctttgcaggaggtcattacgtattgcgtcgctcaaaagcagcctcagctgacgccaagtgatgtatccttcaaaggtctgacgactggagagctggaacagatcgcggaacaggcagcacgtatcggtgagctggaaaatgtatacgcactgacgccgatgcagaagggaatgctcttttacaatctgatggattcgcaatcgggagcttattttgaacaggcctcctttgatctgcgaggagagtttaatatcgctgcctttgcggccagtttggatgttttggtgcagcggcatacagtactgcgtacgaacttctacagcggctggaaggatgaaccgcttcaggtcgtgtaccggaataagcgcagcgaactgtatgttgaggatttgcgggatatggaggaagagaagcaaaacgagtacattctcgaatttacgcgccaagacaaacaaagagggtttgatctggcgcaggatgctttgatgcgtgtggctgttttgcgcacaggtgaggaatgcgtaccgttttgtatggagcttccatcatatcgtgatggacggctggtgcttgtcactggtgaccaacgaagtgtttgcgagttattttgcgatactggcccataaacaacctgaactagcccctgtaacgccgtacagtcaatatatcgaatggctagagcagcaggatcgtcaggccgcatcgagctactggagcaaggttctggaaggatatgaggagcagtcccgtttgccacaggcaaaaattcagggtaagacggggtatcagtcggcagagcgtttggattttgatctgggcgcagacctcacagctggtattcagcgcatagccaagcgttatcaggtcaccatcaatacgttgatgcagaccgtatggggccttttgctgcaaaaatataatggcaccgatgatgtcgtgtttggcagcgtggtatctggacgtccggcagacattccgaacgtggaacatatcattggtctgtttatcaatacgattccggtgcgtatccgcagtcaggtggacagcgtattctccgacgtgatgaagcacatccaggagcaatcgattgcttcccatgtgtatgatacgtatccgttgtatgaaattcaggggttgtcggagcttaagcaggatttgatccatcatattcttatttttgagaactatccggtagaaggaacaaattgagcaattaggtagtagtgaggcgtccagcttcacgatcacaggagccgagtctgttgagcagaccaactatgactttaacgtggtagtgctgccgggaaacaccattcacatgagctttggctataatgccttggcctttgaacgggaaagtgtcgagcaaattcgaggtcatctggtgcagttgctggagcaggtgacagcgaatccgaatattcgcgtacatgaactggacatggttacgatgcaggagcgtaagcaaatcgttgaggtatgggggaatacagcggcagcctatgcaagcgagcaaacgattcacggcttgttcgaagcgcaagcattaaagacaccggagcagacagccttgttctttgaaggagaacagctgacttatcgcgagctgaatgaacgagcgaatcgattggctcgtaccttgcgcagtcaaggcgtgacgaaggatcggctggtgggtctgatgaccgagcgttcggtggacatgattgtgggtatcttcgggattttaaaagccggaggtgcatatgttcctattgatccaacctatccggaggaacgtatccgctatatgctggacgactcgggtgcgaagctgctgttaacacaaagtcatctgatggacaaagcagttatcgatggtcaagtactggtattggatgggagagcaggatcggtgtaccacgaggatggttccaatcctggagccgctgtctggtccgaaacgatttggcgtatgtaatctatacgtcaggtacaaccggacagccgaagggcgttatgctggagcaccacgggctgtgcaatctgaaaacgtattttgatcagacgctcaagattcgtgcgatcggatcatgcactgctatttgccagctactcgtttgatgcggcttgctgggaaatcttccaggcgctgttttgcggggctacgttatacgtgccaacaacagagacgattttgaactacgaacggtttgagcaatatatggcggatcaccacattacggtggctgctttgccgccaacttatgcagtgtatttggagccgggcggatgccgcacctgcgtattctgttcactgcgggttcagcctcatccaccgaactggtatacaagtggaaggatcaggtggcgtactacaatggctatggtccaaccgaaaactcggtggcaacatccatctggccggtatccgaggatgaaagggcaggacaactcatttccatcggacgtcctgtgccgaatcaccgggtatacatggtggatgtccatggacatttggcgccggtcggcgtagcaggtgagctgtgcgtgtccggtccgggtctggcgcgtggttatctggatcgcccagagctgacggcggagaaattcgtagcgaacccgtttgcggcgggtgaagccggctatgaacgaatgtaccgtacgggggacttggcgagatggatgccagacggcaacattgaatatttgggccggatcgaccatcaggtaaaaatccggggctaccggatcgaactgggcgaagtcgaggcacaaattctgaaagtggaagacgtgcaagaggtcatcgtactggcccaagcggacgagcaggggcaaaaccaactggtggcgtactatgtcgctgaaagagacgtaagcgctggggagctgcgcagcttcctgggtgaggagctgccaaactacatggtaccttcgtatttcattcagttggagcagatgccgctgacacccaacggtaaaatcgaccgtaaggccctgccggcaccggaaggcagtctgcaaagcggagcggattatgtagagccgcgcacagcgctggagcagacgttggcttcgatttggcagtctgtattaggaacgaagaacatcgggattttggataatttctttgatctgggcggcgattcgatcaaagcaatccaggtatcctcccgcttgctgcaagcgggctacaagctggacatgaaggatttgttccaatatccgtccatttcgctgctgagtggtcatgtacacccagttagccgtacagccgatcagggcgaagtttcgggtagcgtcaagctgaccccgatccagcagtggttctttggacaagcatcggcagagccacactatttcaaccagtcggtgatgctgcatcgagcagaaggctttgatataggcgcattgcatcgcacggtgacccaggtgacgaagcatcatgatgcgctgcgtatggtcttccgtcagaccgaacagggctatgaggcgtggaatcgcggtgtgaacgaaggcgagctgtacagtctggacgttgtagatttgacggatgtgcaaaacatggcagaggtggcagccgcaattgagatgaaagccaatgccatccaaagctccattcatctggatgaaggaccgctggtgaagctgggacttttccgctgcatggatggagatcatttactgattgccattcaccatttggttatagacgggatctcatggcggattgtgtttgaagattttgcgactggatatgagcaggccgttcggggagaagcgattcgcttgccttataaaacggattcgttctccacttgggcagaacggttgtctcaatatgcgaacagtccggccattgacaacgaacgcgaatactggcagcgtcttgcccacatggaagttgcatcgctacctaaggatcaagacaaagcagcaggacagcctttttgggtcagagatagtgagacggtgaccgtggcttggaacgaacaggaaacccggttgctgcttcaggaatcacatcgtgcgtacaatacggaggtcaatgatctgctgttaaccgcactcggcagcgcattgtacaactggagcggtcaggagcgtgtgctggtcaatctggagggacatggccgggaagctattgttccagatatggatattacacgtaccgtgggctggtttacgagtcagtatccggtgctgctggatgtcgatggaaaggcagagattgggcagcgcatcaagcgggtcaaagaggacctgcgtcatgtgccgcataagggcattggctacggtattttgaagtatatgtcttcggatgatgctacctcttcctggagcctgcagccagagatcagctttaactatttgggacaatttgatcaggatttggaacaaagcgatatcgtgctgtcttcgcatacggacggagagccgatgagtggttataccgtgctggagcagccgctgaatgtgaacggcatgattacagcaggcgtgctgacactggaaattcgctatgacagccaagtatatcatcagcaaaacgtagaaaaatttgcgcagttgctacgggaaagcttgcaggaagtcatcaagcattgtgcctcccaagagcggagcgaactaacgccaagcgatgtcttgttcaaaggcttgtcgttggaacaactggagcaattgacggagcaaacggcttctgtgggcgaactggaaaatgtgtatgctctttctcccatgcagaaagggatgctgttccatagcttgatggagccagactcaggcgcatacttccagcaagcatcgtttgatcaaaaaggcagcttcgatgttgctgttttccgcaagagcctagatctgctgacacagcgtcatgaagcgctgcggacgaatttccatcggtttgagaccggacatggtcaggagccattgcaactggtgttccgtcacaaagatagcgatctgtccttcaaggatgtacgcggaatgcagccagcagaacaacaggcgtatatccaggcgttgaagcaggaggatcaggctcggggctttgatctcggtacggatgcactcatgcgcgtacaggtatggcagaccgatgaagagacgtatcactgggtctggagcttccatcacatcatcatggacggctggtgcttatcgctcgttaccggggaagtgtttggtacgtactttgcgctgctggagcagaaacagccggagctggctccgatcacaccgtatggccaatatatcgaatggctggagcgtcaggacgaacgtgcggcaaaagagtattggagcaactatttggcaggctttgaacagcagacgttgttgccaggatcggatactgcatcgaaagaccacgtgacggacagcagggaacatgcggtatcctcgacagcaagcgaagccagcgaatatgtttctgaaaaagtaacggtagatctggatccaacgtggagcgaagccatgtaccggattgccaagcagcagcaggtcacgattaatacgctgatgcagagcgtgtggggcctgattttgcagaaatataataacaatgaggatgttgtattcggcagtgtcgtatctggacgtccgacggatattgcgggtgtagaaaatatgatcggtctgttcattaatacgatcccggttcggattcaaagtgagcggaatgccacgtttgtggacatcatgcggaacacgcaggagcaagcgttggcttcgggagtatatgacagcttcccgctatatgaaatccaggcgctgaccgagcagaagcaaaatctgattaatcacattatggtatttgagaattacccggtagaggagcaagtcgagcagttgggtgaagttcgtccgtctgcatttgacattacgaatgtagaggttgttgagcagacgaactatgatctggacttgattgtgatgccggatgacaccttccgcatcatgttcagatacaacgccaatgtatacgatcggtctacgatcgagcggatgcagggacatgtactgcatgtcatcgagcaaatcgtgaacaatccgcatatccgtgtgaatgagctggaattggtgacaccggaagaacaggcacagatcgttcaggtgtggggagatacggcggcagcctatccgcaggatcaaacgctaagcgcactgtttgagcagcaggcagcaattacaccggatcaggcagcggtaatattcgggtcggagatgttgacctaccgtgagctgaacgagcgagccaaccgtttggctcggacgctgcgtgcggaaggggttgaacccgatcagccggtaggcattctggtccatcgttcgctggacatgatcgtaggtatctatgcgatcctcaaagcaggcggagcttatgtaccgatcgatccggaatatccggccgaccgcatccgctttatgctggaggattcaggcgcgaagctggtgctgacgcaatcgcatctggcggagcaagcatcacggagtttcgacggtcaggtgctggtgctagatcgtcaggagcaggctggcaagaatatttaccacgaagatggttcaaatctggagcccctggctgggccgcatcatgtcgcctatgtcatctacacctccggttccactggaaaaccgaagggtgtaatggtggagcaccattccgtgttaaaccggattttgtggatgcatgatcgctacggcctgggtgcagaagatacgatcctgcaaaagaccgccttcaccttcgacgtgtcggtgtgggagctgttctggtggtcgatggtcggctcaaaggtaagcctgctgtcggtcggcggggaaaagaacccggaagacatcgtcgacacgattgcccgcgatggcgtgagcacgatgcactttgtaccagccatgctgcatgcgttcctggagtatgtggaacagcagccacgagaagtgatgcaagcgaagctgggcacactgcgccatgtctttgccagtggtgaagccttgccgccacagcatgtggcccggttccagcggctcgtgtcgagcctggccggagcgaagctggtcaacctgtatggcccaaccgaagcgacggtggacgtatcgtacttcgattgcgagcctgatggagcctattcggttattcctatcgggaaaccgattcaaaacattcgtctgtacatcgtcaaggaaggcacggagcaattgcagccgattggggttgcaggtgaactgtgcatcggcggtgtcggcgtagctcgaggttatctgaaccgtccggagctgacggctgagaaatttgtgaaagatccgtttgctggcggggaagcagggtatgagcggatgtaccgcaccggcgatttggcgagatggatgccggacgggagcattgaatatctgggccggatcgaccatcaggtgaaaatccgggggtaccggattgagctgggcgaggtcgaaacgcagttgctccaagtggaatcggtacgagaagcgattgtcatggctcgtgcagatgaaacgggacaaaaacacatggtggcctactatgttgccgggcaagaaatcagtgccagcgagctgagaagtgcgctggggcaggaactaccaagctacatggtgccgtcctactttgtacagctggagcagatgccactgagtcccaatggcaaaatcgaccgcaaggcactgccggcaccggaaggtagcctgcaaagcggagccgattatgtcccgccgcggacgtgggtggaagtgaagctggcgcaaatttggcaggatgtgctgggcctggcgcaagttggcgtgaaggaaaacttcttcgagattggcggacattcgctgcgggcgacgacactaacctcgaagattcaccaagagctgaacaagcagcttcctctgcgcagtatttttgaagcaccaacgattgaacaactggcggctgtgctggaaggtctggatcaggtggcgtatgcgtccattccggtaacggaagagcgtagcttctatccactatcctcggcgcaaaaacgactgtatgtgctgcatcagttcgatccgctggatgtgaactacaacatgccgtcggtgctgcaagtgagcggtccgctggacgtgaaacgagtggaacatatattccgtcaactgatcgcccgccatgcgaccttgcgtactcgctttgagctgatcgacagtgagccaatgcaatggatcgaggacaccgtaccgttcgaggtggaatatacgaaggtacaggcagagggtgcgactgcggatacagatcaggacacaactacagatacgtacaccagggtcaacatagaggcgcaacagctggtgcggcgctttgtccgtccgtttgacctgaaagctgcgccgctgctgcgagtaggcttggtggatctgggccttcaaggaatagagcaggaatcccaacatctgcttatgctcgatatgcaccatatcgtctcagatggggtgtccctggaggtcctgactgatgagtttgtccgtttgtatggcggtgaagagctggcgccattgcggattcagtacaaagattatgccgtatggcagcaaagcgaagcccatcaggaatggatgcagcgtcaggaagcgtactggctgagcactttccaaggtgaactgcctgtactggatctctctacggactttgcccgcccagcggtgcagagtacggcaggggatacggtcgaatttgtactggagcgtgaggttagtgaacgcctgaaagaactggctgcccagaccggctctaccctatatatggtgatgctggcggcgtacaccacactcttgcacaaatacacaggccaagaggacatgattgtcggtacgccaattgccggacgaccgcatgcggagctcagtaatctagtcggtgtcttcattaacacactggcgattcgcaattatccgtccagcgacaaatcgttccttgagtatctgcaagaggtcaaggagcaggcacttaatgcttatgagcatcaggactatccttttgaagagctggttgaaaaactgaatttaacccgggatacgagccggaatgcgctgtttgacacgatgtttgagctgaaaacaatggagcagcgggatttcgagctggaagggctgagcttgagctcctatccactggacaatcatacggccaagtttgatctgagcttggaggcaatagagcagccagaaggtattctgtgcagtctggaatacagcacagcgctgtacaagcgggagactatgacgcgattggcagagcattttgcggaaatcgttcgagcgattgcctatcatccgcagcagccactggcagttttgaacatggtaaccgatgaggaacaagagcaactcatctacggttttggagaagtgggcgtaacggatgttgctgttgaagcaggaaccctgttccatacctatgtggaagaacaggcccagcttataccagatcatgtggcggtggtatacgaggagcaacagcttacgtaccggaaactgaacgagcgtgcgaaccaattggcgcgtagattgcgaaatgaaggtatcggacgcgagtcgattgtcggcattttgagtgagcgctcggtagacatgctggtcggcgtactggcagtatggaaggctggaggcgcatatgtgccgctggatgcggattatccgtccgaacgcattcgtttcatgctggaggacagtggtgcgacggtactgttgacccagacgggattgcaggagcgcgcacaagcatggctgaatgaaagccaatggacttggggcgatgaaaaagctaagggtgagctggagacggcggttagcgctgaaacgatggaaagagacaacctgaatgaaggtttgagcttgaaatcagattcgaagtctgacagcgaagcagcatctgaatcggcaacaaagctgcgtctgcaaatcatgctggcattggacgatgagtcactgtacaccggagatacgacagacgttgatcacatcaacgaaccgcaggatctggcgtatgtgatctacacctccggaacaaccggacgtccgaagggcgtcatgattgagcatcgcagtttggtgaatacagctgcggcgtatcgccgggattatcgcctgagcgagttcccagtacgactgctgcaactggcaagcttctccttcgacgtgttcgtcggggatatggcgcggacgctctataacggaggcacgatggtcatctgtccgaaagacgaccgacttgattttagccgtctgcatggctggattcgtgactaccaaatcactgtgttcgaatcgactccagctttgatcgtaccgtttatgcagcatgtgcatgaacaggggctggacatgagcagcatggaactgctgatcactagctcggatagctgcagcgtgacggattaccgggtgctgcaagaacggtttggcgcagatatccgcatcatgaacagctatggcgtcacggaagcagcgattgactccagcttctatgacgaagagctgtcgaagctgccaagcagcggccatgtgccgattggtcaggcatggctgaatgcccgcttctacatcgtggacagccagctgaatccggtgccgatcggtgtactgggtgagctgtgcatcggcggagccggggtcgcacggggctacctaaaccgtgcggacctgacggcggaaaaattcgtagcgaacccgtacgtaccgggcgaacgactgtaccgcacaggcgacttggcgcggtggatgccggacggcaatgtagactttatcggccgaatggatgatcaggtcaaaatccggggcttccggattgaactgggcgaggtggaagcgcaactgctgactgtggatggcattgagaaagccatcgtcaccgcctgggaaaacgaaaacggagacaaagatctgtgcgcgtatgtcgtcgcctcggaggcgctgaatttgccggagctacgcagcacactccagcccaaactgccgggctatatgatcccgacgtatgtcgtaccactggatcaattcccgctgacaccaaacgggaaaattgaccgcaaagcgttgccagcaccggaagctcgcctcgaaggaggcacggagtatgttgcgccgcggacagagctggaagagcaactggtacgtatttggcaaagcgttctgaatcatcagcgggtaggcatccaggataacttctttgaagtgggaggacattctctgcgcgctacaacactgatggcgaaaatccatcaggagctgaatcacaagctggccttgcgagatattttccaatatccgacgattgagcaattggtacaggtgatgggtgaagatcagacccagcaaatgtatgtatccatacctgtggcggaggagcgcgactattatcccgtttcctcggcgcaaaaacggatgtacgtgctgagtcatctggaaggcggagaggtgagctacaacatgccgggagctttgattatcgaaggctccttggataaagagcgactggaacaagccttccgccagctgattgcccgtcatgaaaccctgcgaacccgattcgagatggtggatggcgaggtgattcagcggattgaatctaacgtcccattcagcgtggagtatgtgcaagcaagcgaagaagagacaccgcagtacgcacaggactttgtacgtgcctttgatctcgcacaagccccgttgctgcgggttcagttgatcgaaaacggaccggggcgtcacgttatgctctatgacatgcaccatattatttcggatggcgtcacggaaggaattatcgtgcaggagttctctcaattgtacgaaggcaaggagctcccgccactccgtattcagtacaaggactatgccgtttggcagcatgcagatatgcaaagtgaacgtcttcgtgcgcaagaaagctattggctgaacaccatgtctggtgaaattccggcactggatatgccaacggattttacaagacccgctgtacagcgtctggaaggaactcgatttgagtttgcgatctgcatggaggacagcgagcagttgaagcagctggccgcgcaaaccggatccaccttgtacatggtgttgcttgcagcgtatagcacactcttgcataaatacacgggtcaagaggacatcatcgtcggcacgccgattgccggaagaccacatgcggagctcagtagcctagtaggcgtattcctgaacacactggcgattcgcaattatccgtctggtgataaaacgttcctggactacttgcaagaggtcaaagagcatgcgctcagtgcgtatgagcaccaggaatatccgtttgaagaactggttgaaaagctgaatgtaacgcgggatacgagccggaatgcgctgtttgacacaatgtttgagctgaaaacatttgagcagcaggagttcgagctggaagggctgaccttcaagccgtatccgacggacgatcatacgtccaaatttgatctgaccttggatgccgtagagcagtcagaaggcattctgtgcagtctggaatacagcacggcgctgtacaaacctgagactatcgcgcgctttgcgcagcattttaccgaactcgtacgagccattacactgcatccacagcagccactggcagctctggatatggtaactgtcgaggaaaaagcacaaatcctctatggttttggagatgtaggcgtatcagatgttactgcggttgaagcaggagcactgttccatacctacgtggaagaacaggcccagcttgtaccggatcatgtggcggtggtgtacgaagagcaacaacttacgtaccgcacactgaatgaacgtgcaaatcaattggcgcgtagattgcgaaatgaaggtatcggacgcgaatcgattgtcggcatttggagtgaacgctcggtagacatgctggtcggcgttttggcggtgtggaaggctggaggcgcatatgtgccgctggatgcagactatccgtccgaacgcattcgtttcatgctggaggatagcggtgtgacggtgctgctcacgcaaacaggtttgcaggagcgtgcccaggcatggctgagtgaaagccaaggggctctgggcgaaggaaagaccgagggtgagttggaaacagcggttagcgctgaaacgatggaaagcgaccgcctcaatgaaggtgtgagcttgaaagcagattcgaagtctgacagcgaagcagcatccgaatcggcaacagggttgcgtctgcataccgtactggcattggacgatgagtcactgtacaccggggatacgacggatgttgaaccgatcaatgaaccgcacgatctggcgtatgtgatttacacctctggcacaaccggacgtccgaagggcgtcatgattgagcatcgcagcttggtgaatacggctgcagcgtatcgccgggattaccgtctgaaccagttcccggtacgactgctgcaactagccagcttctccttcgacgtgttcgtcggggatattgcacggacgctctataacgggggcacgatggtcatttgtccgaaagacgaccgcattgatccaagccgtctgtacggatggattcgcgattatcagattaccgtgttcgaatcgactccagccctgatcgtaccgtttatgcagcatgtgcatgaacaggggctggacatgagcagtctggaactgctgatcaccagctcggatagctgcagcgtgacggattaccgggtgctgcaagaacgatttggtgcgaatatccgcatcatgaacagctacggcgtcaccgaagcggcgattgactccagcttctatgacgaagaactatcgaagctgccaagcagtggcaatgtgccgattggtcaggcatggctgaatgcacgcttctacattgtggacagtcagctgaatccggtgccgatcggtgtactgggcgaactgtgcatcggcggcatcggggtcgcacggggctacctgaaccgtgcggacctgacagccgagaaattcgtagcgaacccatacgtgccgggtgaacgtttgtatcgcacaggtgacttggcacggtggatgccggacggcaatgtggactttattggccggatggactatcaagtcaaaatccggggataccggattgagctgggcgagattgaaacggcgatccagcgagtgccaggtgtgcgtcaagccgtagtcatcgaccgaacggatgagcgtgggcacaagtatttgtgcggatacatcacgggagaaaccgagctgcggatcgaggaagtacagaccgagctggaagccggactgccagcgcatatggtgccagcacgtctgatgcggctggagacgatcccactgaccagcaacggcaaaatcgaccgcaaggccttgccggagccagaaggcagcatccatacgggagcagcttatgtggccccgcgtacgaaggtggagcaggtactggctgcggtatgggccggagtgctcggcgtagaagccgtaggcacgcaggataacttcttcgagttgggcggcgattcgatcaaagccctgcaagtctcgtcccgcttgctgcaagcaggttatcgactggagatgaaagatctgttcagtcatccgacggtgtctgccttggcgctgaaagtccaatcggtgacaagattggcagatcagagccaagtggtgggcactgtgaagctgacacctgttcagcattggttctttgagcagaacctgacggatgctcatcatcataatcagtccatcatgctgcatagcaaggatggttttgatgaggcagcactacgcacagcgatggaccacatcgttagccatcacgatgcactgcggatcgttttccgtcctacggagcacggatatgaagcctggaaccgcgcggtgggtgagggcgagctgtatacgctggatcaggcagacttcaggaaggagtctgaagtgtctgcggcgatcgaggctaaagcaaatgaaattcaggcgggcattcatttaagcgaaggaccgctggtgaagctggggctattccattgccccgatggagatcatttgctgatagctattcatcacttagtagtagataccgtatcctggcgtattttattcgaggatcttacgacagcctatgaacaggcactgcacggacaagcggctcgtcttccgcacaaaacggattcgttccgcacctgggctgagggacagtctcactatacgaacggtccagaaatggcagcagagctcgccttctggcaggaagtggaacagggggcgtatgagccgcttccaaaagaccagccgcaaccacaatccttgaataaagacagcgagcttatgacggtcacatggaccactcaggaaacggagcagttgttaaaacaggcgcaacgtgcctacaacacagatatgaatgatctgctgctgaccgcacttggcacggctattcatcgctgggcggggattgaacgtgtgcttgtcaccctggaaggccatgggcgggagtccattttgcccgagctggatattacgcgcacggtgggctggtttacgacacagttcccggttgtgctggatatgagcgcagggcaagacctttcacagcacatcaaacaggtgaaagaagggctacgccggattccgcaaaagggcattggctacgggatgctgagatacctgtctgcagcatgtgagcaagcgcattttggaaccgaacctgaaatcagctttaactatttgggacaatttgaccaggatatgcaacatcaatccattggcgtgtctccttacgctagtggtgccgagcttagcgcacatgcagccagatcgcacaccctggatctgaacggactgatttccgaaggtcaattgcaattgacgatcagctacagccatcaggaatatcgcaaggaaacgatggaacagctagccgaagcgctcagaaccagcctgcaggaaatcatcgcgcattgcgtgggtcgcaaacagcaggaactgacgccaagtgatgtgatgcttaaacctgtaaccttggccgagctggatcagttggtcgaacggacgcgtgacatcggggaactggaaaatgtatatgcattgacaccgatgcaaaaagggatgttgttccatagtctaatggatgcagaatcaggggcttattttgaacaaacgacctttgatctacacggacgcttccaagcggatattttccaagatagcttgaatcaactggcgcagcggcatgagatctttagagccaatttcatcagcgggtggcaggatgagcccgtacaggtgattttccgccataaagaggttggtttcagatgtgaagatttgcgtcatttggatgatcaggaacgtgacgcgtatgtgcaggaatttattcgccaggacaaggcagctggattcgatttgtcccgggatgcgttgatgcgcgtggcgattttgcggacaggtgatgaggattattattttgtatggagttctcatcacatcctaatggacggctggtgtgtggcgttggtaacggatgaggtgtttgaggtttactttgcagccgtagagcatagagcaccgaagctcccccctgtgactccatacagtcagtatattgcgtggctggaagcacaggatgtagaagcagcagcctcgtactggaaggaatatttgctgggctatgatcaacaaacttcgattccgaccggaaaagtaggcgcgaaagcggacggcgaacaatttgagcatgtactgtgcgacctaggtaaggatttaacaggacgtatggaaatggtagccaagcagtatcacgtgaccaccaatacgctcctacaaacggcctggggcttactgcttcaaaagtacaacggtagtaacgacgctgtctttggcggtgtagtatcgggtcgcccggcagatatttcagggatcgaaaacatggtgggcttgttcattaacaccattccagtacgtatccgtagtaaggctgaggacacttttgccgacctgattagagcgaatcagcagcaggcgctggcttctcaagattatgaaacgtatccgctgtatgaaattcaagccttgaccgagcaaaagcaagagctgatccagcacattatcgtgtttgaaaactatccggtggaggagcaggtcgagcagcttggcgaaggtgcggaatcggattttgtcatcagcaatgcagggatgattgaacaaacgaactatgatttcaatctggtcgtcatgccgcaggaagcgatgaaaatccgattcgaatacaatgcgaagttatatgatcgggaagcggtggaacggacgcagggtcatctggtacagctgctggagcaggtggtagcgcagccggacattcaagtgcaggagctggatgtgttaagcgagcaggaacgcgagcaaattctccgtgtatggggagatacagctgctgagtatccaagcgatcaaacgatccatggcttgttcgaagcacaagccgtgcagacaccggaacagccagcgctgtacttcgaaggagagcagttgacctatcgcgagctgaatgaacgtgcgaatcgtctggctcgtaccttacgcagtcaaggcgtgacgaaggatcggctggtgggtctgatgaccgagcgttcggtagacttgattgtgggtatgttaggcattttgaaagctgggggcgcatatgttccaatcgatccaacgtatccggaggagcgtatccgctacatgctggacgactcgggagcagagttgttgttgacacaaagccatctggtagacaaggtatctttcaatggaaacgtgctgatgctgagtggggcaccgagtgtgtatcacgaggatggctccaatctggagtcgttgtctggtccgaacgatctagcgtatgtgatttatacgtcaggtacgacgggacagccgaaaggggttatgctggagcatcgcggtctgtgtaatctgaaaacgtattttgataaggaattccagatcagcgcgtcggatcatacactgctgtttgccagctattcgtttgatgcagcttgctgggaaatattccaagccctgttctgtggtgccacgttgtacatgccaacgtcagagacgattttggactatgagagattcgagcattacatgacagaacatcagattacgatagcgacattaccaccgacctatgccgtctatctggagccagaacggatgccaaacctgcgtattctgatcactgccggttcagccgcttcaacagagctggtatacaagtggaaggatcatgtagcgtactacaacggctacggtccaactgaaaactcggtggcgacatccatctggccagtatccaaggatgagagagcaggacagctgatttctatcggccgccctgtaccgaatcaccgggtatacatggtggatgtacatggacatttggctccaacaggcgtagcgggtgagctgtgcgtgtccggtccaggtctggctcgtggctatctggatcgtccagagctgacggctgagaaatttgtaccgaattcatttgcggctggcgaagcaggttatgatcgaatgtatcgtacgggtgacttggcaagatggatgccggatggcaacatcgaatatttgggccggatcgaccatcaggtgaaaatccggggttatcggatcgagctgggcgaggtcgagacacaaattttgaaagtagagagcatacaagaggtcatcgtactggcccaggcggacgagcagggacaaaaccaactggtggcgtactttgttgccgaatgtgacgtgagtgccggtgagctgcgaagcttactgggtgaggagctaccaaactacatggtgccttcgtacttggtacagctggaacaaatgccgctgacaccgaacggtaaaatcgaccgcaaggccctgccagcaccagaaggcagcctgcaaagcggagccgactatgtcgcaccgcggacgtgggtggaagtgaagctggcgcaaatctggcaggatgtactgggtctgactcaggtcggcgtgaaggaaaacttcttcgagattggtggacattccctgcgggcgacgacactggcctcgaagattcacaaagagctgaacaagccacttccactgcgcagtatttttgaagcaccaacgattgagcaactggccgttgtactggaacagctggatcaagtgacgtatgcctctattccggtaacggaagagcgcagcttctatcccctgtcctcggcgcaaaaacgactgtatgtgctgcatcagttcgacccgaatgatgtgaactacaacatgccgtcggtgctgcaagtgagcggtccgctggatgtgaagcgagtggaacatgcattccgtcaactgatcgcccgtcatgcatccttgcgtacccgctttgacctgatcgacagtgagccgatgcaatggattgaggacaccgtgccgttcgaagtggaatatacgaagctacaagcagagggtgcgactacggatacagacacgaaggccagcaaggaagtgcatgagctggtgagtcgctttgtccgtccgtttgatctcaaagctgcgccgctgctgcgagtaggcttggtggatctaggcgtccagggagtagagcaggaatctcaacatctgcttatgctcgatatgcaccacatcgtctcggatggggtgtcgatgggggtactaactgaagaatttgtccgcttgtacgacggtggagagctgccgccactgcggatacagtacaaggattatgccgtatggcagcaaagtgaagcccatcaggaatggatgcagcgtcaggaagcctactggctcgataccttccggggtgaactgcctgtgctggatctaccgacagactttgcccgtccggcggtgcgaagtacggcaggcgataccgtggtgttcggactggaacgcgaagtgagcgaacgtctgaaggaactggcggcgcacaccggctctacactgtatatggtgttgctggcggcgtataacgccctcttgcaccaatacagcggccaggaggacatcgtcgtgggcacgccgattgccggacgaccgcatgcggatttggagccgatcctcggtatgttcgtcggtacgttggcattgcgaaactatccgacagcagaacataccttccgcagctacgtggaagaagtgaaggttcgcgccctgcaagcctacgagcatcaggactatccatttgaggagctggtggaaaagctgaatgtgaagcgggatatgagccgccatccgctattcgatacgatgtttaccctgcaaacgaccgaggagggcgaactgcaactggcagacctaagcttccgtccatacggcctggaacaaacgccagcgaagtttgatctgacgctggaagccagagaggaagaggcaggcatccagttcggattgcagtatgcaactgcgttgtatcaacgggaaaccgttgaacggatgactcgtcactttattcgcttagccgaagccgtggcagcgaacccggatgcgaagctgggtgagctggagctcattacgacagaagaaaccgaacggattctgaaggtgttcaatgatccgaacgcacatagcgtgcgtggaacactccaaggcctgtcgctcagcgagcgttttgaagagcaagcgaaaaacagccctgagcggatagccgttgtgtctggggacatggcgctaacctacgctgagctgaatgagcaggcgaaccgattggcccgtgtgttacgtgcgaaaggggttgaagcagatcaaccggtaggcgtactgctggaacgttctgcggatcttctggtgagcattatgggggtactgaaggccggaggcgcgtatgtgccaatggatacgatgtatccacaggagcgcatcgactatatgcttcaagacagtggggcgaaggttgtaatcacaagcagagccgccaacctgtcactccaactgccatcgacagtacaagctatcgttcttgacgatgaggacgtacaggctcaattgggagcacaggatgcgagcaacctgatccctgtcggcggcctgcacaacctggcctatatgatttacacgtcaggtacaaccggtcagccgaaaggggttatgattgagcaaggcagtgtcggcaatctggtagacgctttatatgagcgagtgtacagccggtatgatcagccgcttcacatcgcatggctgtccgcatttgtatttgacgcttcagtgaagcaaatctttgccagcttgctgctaggccacaccctgcatgtggtgtcccgtgacgtcagcctgagcggagagcatttgatcgcctactatcgcacgcaccgaatcgatctgtcggacggcacaccagcgcatctgcatattttgaacgaaagcgtcaatgtgacagaagcgccggatgtgaagcattacctgatcgggggcgaggccttatccgtgcagctggtacaggggttcctacacaaatggtccggatatcgcccggtcattacgaacgtgtatggtccgaccgaagcgacggtagatgcaacagcctatacgattgaagatgtagagtcactgcatgtactgctggaaaaaggggagcatacggtatccattggaacgccgatagcgaaccaggctgtgtacatcttgaacactcgacaacagctggtaccgatcgggatcgcgggtgagctctatattggaggtgcaggtatcgcacgaggatacctcaacctgccggaactgacggctgagaagtttgttccgaatccgtttgctgatgcgacagccgctgatccggcggacagcagttacgcaaaccggatgtaccggacaggcgacctggcacggtggctgccggatggcagtatcgagtatttgggccggatcgaccaccaggtgaaaatccgcggctaccggatcgagctgggcgaggtggaagcacagctgctgaccgtggacggtatccaaaaagccgtggttacggcatgggaaaacgaagacggacacaaggatctgtgtgcctatatcgtagcttcggagtcgctgagtctaccggaactgcggaatgcgctgcagccgaagctgccggattacatgatcccgacgtatgtggtacagctggatcgtttcccactgacgccaaacgggaaaatcgaccggaaggcgttgccagcaccggaagcacgccttgaaggaggtctggagtacgtggcaccgcggacgccactggaggccaagttagcgcaaatctggcaggatgtattgaagctgtccagcgtaggcgtcaccgactcattcttcgatgtggggggacactccctgcgggcaacgtcgctggtggccaaaatccatcaggaactggacagccgaatgacactgcgtgaggtgttccagcactttacgattgagcagcaagcccagctcatcgcaacgcacgggacagacacctatacggtgatcccaactgcgacgaaacaggcgtactaccctgcttcctcagctcaaaaacgactgtacattttgagccatctggaaagtggagaggtcagctacaatatgccgggtgtattagtcgtggaggggccgcttcaggcagatcgactggaggaggcgttccgtcagttaatagcccgccatgaaacgctgcggacttcctttgaaatggtggacggcgaggttgtgcagcgggtttacgatcaggtggcgtttgcagtagaacgcctgcaggtccacgagtctgaagccgaagcgtatatcgagtcctttgtacgcagcttcgatcttcagcaggcaccgctgctgcgtgtccgtctcgttcaaaccggacccgagcgccatctcctgatgtacgacatgcaccatattatttcagacggtgtatcgtctaaccatatcgtgcaggagctgcgacaactgtacgagggacaggctctagagccgttgtccattcagtacaaggactatgcggtgtggcagcagcaggaaatgcagcgtgagtcctaccagcgccgggaacagttctggctggagcatttagccggggaattaccggtactggatctgccgattgcttatcctagacctgctgttcgcagcttcgagggagcaacgtatgagtttaccgtggacccgaatgtatccgagcaattgcgccaagtggcggcacagaccggaagtacgctgtacatggtgctgatgagcgcctacaccgttctgctgtccaaatatagtggtcaggacgatttgatcatcggtacgccggtagcaggtcgtttgttacctgaactggagccgctgatcggcatgttcgtcaatacactagccatccggcatcagccgcagggcaactcaacgttccacagctacctactggaagcccgagagcgtacgttacaagccttcgagcatcaggattatccgctggaagagctggtggaaaagctggatatagtacgggatgcaagccgtaatccgttgtttgatactatgtttgtactgcaaaatacggagtcacaggaagcaaagcttgaaacgttgtccttcagtccttatgtgcaggagcatcgtatttccaaatttgatttgaccttgtccatgagtgatgaagacgggcagatcaagggttcctttgaatattgcacgaagctgtttggcgctgacgctattgaacgattaaccggagatttgatagcgatcctgtcacaggttgcggccaatccagatttgcaattaagcgatattcaggtgaacttgggtgaacaagcagaaggcttctcaccggattccatcgactttgttttctag

SEQ ID NO: 409 - protein, 14080 aa, Paenibacillus polymyxa
  REGION 1..14080: note = strain LU17007
MTQHDVQLFALSQPQQRIWYTELVYPNRNTSTIITTVKIKGTVRIDALQQAMNRVIARNDSFRIKITVWDGIPYQYVEPFANQSIETLQVTQEEAELWVSHHNAQPFPLLDSQLYRFVILQLGAEDTWFSFKMHHIISDGVTMEQAINEITGNYMNIVHGTGSDAPVPANSYLDFIQTEQSYEQSERYQKDKMYWTEKFANLPEVTGLKSYNPLTVSTAARRETYTLEHELYCGVTAFCEAHNISIFTFFLAALYIYLHKTTGEQDLTVGTLYANRTLKKEKNTMGMFVSTVATRLQVEPESELLTFLQGVGKEQSSILRHQRYPYNKIIQDLREQQSGTDIGRLFGVTIQYRTLSFSRFDEAVQQVHTDFCGDTVSDFDIAMIDMLDDDKLVLQLDYRTELFSEQEIARMIHQFLSVVEHMVKGPQQRIQELSLMSDKERAQIMNVFNATTVPFPDDVGIHELFKKQAECTPDQTAVMFGSQSLTYRELNERSNSLARMLQAQGVGPDKLVGLMMQRSVEMIVGLLAVLKAGGAYVPIDPEFPSSRIEYMLEDSKAAVLLTSRDLAEEHHCQANTMFLEDAELYQGDSCNLEVISHPEHLAYVIYTSGSTGNPKGVMLQHRSVLNFITGMREIIDFEAGKTILSLTTISFDIFVLETILPLLAGMTVVLGDHQHQLDPQALGELITHHSIEMLQMTPSRLQMLLDHEAGSRALRGVKEIMVGGEALPSKLLAALQEINGPRIYNMYGPTETTVWSTVQELTHAQEINIGRPIANTQIYIINANGELQPVGVPGELCIAGEGLARGYWNLEDLTAEKFVNNPFAGDKAGYERMYRTGDLARWTLDGNIEYLGRMDHQVKIRGYRIELGEIESQLLQVESVREAAVVARVDETTGQKQMVAYYVASQAMEASKLRSELGRELPSYMVPSYFIQLEQMPLTPNGKIDRKSLPAPEGSQQSGADYEAPHTAREQALATIWQSVLGVPTVGILDNFFDLGGDSIKAIQIVSRAFQAGYKLDMKDLLRCPTIAALAPLMTSRMADQGEVSGETALLPIHHWFFEQEQVDAHHFNRLVMLHREQGFDEAALHQALIQLTEHHDALRMVFRKTEQGYQAWNRGIQEGELYHLDVLDFRDLTDEVILSTKIETKATEIQNNINLSEGPLVKLALFRCTDGDHLLVAIHHLVVDGVSWRILLEDLASGYEQALRDESVRLPNKTDSFRLWADQLAAYANSTALEKERAYWEQVERAGAAQEALPKDYTRKSQAKPQLRDDRTLTVAWTVEETEQFLKQAHRAYNTEANDLLLTALGIAIQEWAGIRQVLVNLEGHGREAILPDMDITRTVGWFTSQFPVVLDMGEDRNVGQRVKNVKEGLRRLPHKGIGYGILRYLADREGKAAFVAEPEISFNYLGQFDQDLKNNAFRMSPYSIGASMSDTLTKRYALDINGMITDGALELTISYSNKMFMKKSIKKLADLLQESLREVLAHCVVKELPELTPSDLSFQGLTAGELDHIVEQTAAAGELENIYSLTPMQKGILFHGLMEPQSGAYFEQATFDLQGSFQVEAFAESLNQLVDRHQIFRTNFYSGWNEQPLQVVYRHKPAGFRFEDIRLMGQEEQDAYIADFAERDKAEGFHFSSGELMRVSILRTGEESYRFVWSFHHILMDGWCLFLVVGEAFNTYFAILEDRKPELVPVTPYSEYIEWLDRQDKTEAERFWRDYFAGFEQQTVLPQVKQLDGHAKAYEADKLSFTLGREVTERMNKLVKQKQVTVNTLLQAAWGVVLQRYNNSRDVVFGSVVSGRSADIPGIDKMIGLFINTVPVRIHSEKDMTFAGLMKQIQEQALASRAYETYPLYDIQALTEQKQDLVNHIIVFENYPVEQRMEQMGSRGANGFTIANASMSEQTNYDFNITVVPGDEIHFHLEYNARVLERAAVEQIREHLLHMIEEAIHRPDARVDELELVTAAEKAKIIDGFGSVGVSAWSDEKQSEGLFHAYVEEQAQLVPDHVAVVYEERQFTYRELNERGNQLARRLRNEGIGRESIVGILSERSVDMLVGVLAVWKAGGAYVPLDADYPSDRIRFMLEDSGATVLLTQTGLQERAQGWLEASRQALVGGQTEGELETAAGAETMERDSLSEGVSLKSDSKSDNEEASEPATGLRLRTVLALDDQSLYTGDVTDIEPINEPHDLAYVIYTSGTTGRPKGVMIEHRSLVNTAAAYRRDYRLNQFPVRLLQLASFSFDVFVGDMARTLYNGGTMVICPKDDRIDPSRLYGWIRDYQITVFESTPALIVPFMQHVHEQGLDMSSMELLITSSDSCSVTDYRVLQERFGADIRIMNSYGVTEAAIDSSFYDEELSKLPSSGHVPIGQAWLNARFYIVDSQLNPVPIGVLGELCIGGAGVARGYLNRADLTAEKFVANPYVPGERLYRTGDLARWMPDGNVDFIGRMDYQVKIRGYRIELGEIETAIQRVPGVRQAVVIDRTDERGNKYLCGYITGEAELRIEEVQAALEAGLPAHMVPARLMRLEIIPLTSNGKIDRKALPEPEGSIHTGAAYVAPRTTVEQVLAAVWAGVLGVEAVGTQDNFFELGGDSIKALQVSSRLLQAGYRLNMKDLFSNPTVAALSPLLRTDGKMASQEEAVGPVELTPIQRWFFEQQPADLHHSNQAMMLYRAGRFDVDALRRTMDRMVQHHDALRTVFRETEQGYVAWNRSVAEGELYTLDIVDFSAVEDESTAVEAKASEIQASIHLSEGPLVKLGLFHCAEGDHLLIVIHHLVVDGVSWRILLEDLASGYEQAVAGQTGTAIRLPHKTDSFQVWAKQLSAYASSATMERELAYWQHIEQAEASLAKPLPKDFANDNALLGDSEVVTVRWTKQETEQLLKQAHRAYNTEMNDLLLAALGKAVYDWSGSERVLVNLEGHGREAIVPDVDITRTVGWFTSQFPVVLDGSLGQGGHTARLIKKIKEGLRHIPQKGIGYGILRYLSDMNMLEKAGVRLQAQPEISFNYLGQFDQDYKGNDLQPSAYSIGVPVSTNATMDFALDINGVIEDGELMFTIRYGTTQFRHETIERLGELLASSLREVIHHCVAQERTMLTPSDVLLNHVTLDELEQLVEDTRDLGELENVYALTPMQKGMLFYSLMDENSAAYFEQATFELNGRFDVVTFGKSFDLLVQRHEALRTNFISSWKDEPVQVVFRNRSGQLYYEDLRGLEKEERKAQVEAFTLADKAKGFNLAEGALIRISILQTGDETYHFIWSFHHILMDGWCLSFMTQEVFGSYLALRAGWEPVLEPVTPFSRFIEWLERQDREAALQYWSGYLADYEQQITLPQQKTQPKSMHVGEYIAEDLDCEFQPELVAQIERVAKQNQVTINTLIQTVWGVLLQKYNNSTDVVFGSVVSGRPGDIPGVEHMIGLFINTIPVRVQSEQGETFVELMKRTQQQALASNAYDAFPLYEIQALAEQKQDLINHIMIFENYPVEQQVEQLGSEGQEPFTISNVVSTEETNYELNVVVMPGEGIKIRFMYNTLSFDQAGIERLYGHFARLLEQISLNPHVRVEELELLTAAEKQQITAAFNDTACAFPCKQTIHQLFEEQVEYTPDQVALVFGHQSLTYRELNERANSLARILQAQGVGPDKLVGLMVHRSVEVIVGLLAVLKAGGAYVPIDPEFPSSRIAYMLEDSEATVLLTNRDLLEEHHCHANAIFLEDKELYQGENGNLETVAQPEHLAYVIYTSGSTGNPKGVMLQHRSVLNFITGMREVIDFEASQTILSLTTISFDIFVLETILPLLGGMTVVLGDSQHQVNPQALGELIAHHHIEMLQMTPSRVQMLLGHEAGSRALQGVKAIMVGGEALPSKLLATLQEINGPRIYNMYGPTETTVWSTVQELTHAQQINIGRPIANTQIFIMNANGELQPVGVPGELCIAGEGLARGYWKREELTAEKFVNNPFAGDKADHERMYRTGDLARWMPDGNIEYLGRMDHQVKIRGYRIELGEIESQLLQMESVQEAVIMARTDETGQTQLVAYYVASQELGANELRQELGQELPSYMVPSYFIWLEQMPLTPNGKIDRKALPAPEGSLHSGADYAVPRTVTERALVAIWQSVLGVPTVGTLDNFFDLGGDSIKAIQIVSRAFQVGYKLDMKDLFRYPTVATLAPHMHETSRMIDQGEVTGETTLLPIQHGFFAQEQVDVHHFNQAVMLHREQGFDESALRQALGKLAAHHDALRMVFSKTEQGYQAWNRGIQEGELYHLDVLDFSNLTDEVMLNTAIETKASEIQSSIQLQEGPLLKAGLFHCADGDHLLMAIHHLVVDGLSWRILFEDLAVAYEQAIREEALQLPDKTDSFRFWSQKLSTYANSATMESEHTYWEQWNAAALLDQVRLPEDQGQAEPFTLADTDTVDFQLTEEETEKLLKQAHRAYNTEVNDLLLTALGMTLYTWTGHERSLIHLEGHGRENILPDTDLSRTVGWFTSQYPVWLDIGRDHALSECIKQVKESLRHIPNKGIGYGIWRYLNESGQAVGQHQAFAEPQVSFNYLGQFDQDLQNSDIRMSPYSMGSVISDRTKMKYTLEVSGIVTNGILELEIRYNGKAFRKDTVQMLADLLKSNLLEMIEHCVTRERTELTPSDVLFKGLTLEQLDTIKEQTKTLGELENVYPLTPMQKGMLFHSLMNAETGVYFEQATFDLEGYFTPSIFEESLKLLVSRHAILRTNFYSGWHGQPLQIVYRHKNPSFFYEDVRGCEQAVAEFVAQDKARGFDLSKDALMRVAVFRTGDRSYRFVWSFHHIVMDGWCLSLMTDEVFGAYVALLENKQPELAPVKPYSDYIEWLEHQDAREATRYWSNYLAGFGQQTLLPSENVQASVVERDEDTDRSGGSSNSGYVSEKLPFMLGKERSATLNRIAKQQHVTINTLLQSVWGVILQKYNNNQDVVFGSVVSGRPAEIAGVENMIGLFINTIPVRICSAPDATFAEVLQRTQEQALASSVYDTFPLYDIQALTEQKQDLIHHIMVFENYPIGQQMKQMGGSGETKAQTGFSIANVALAEQTNYDFNLIVVPDEDISILFEYNALVYNRSAVERIYGHINHVIGQIVDNPHIHVNELELVTPEEQTQIVQVWGDTAAAYSQDQTLSALFEQQAANTPEQVAVLCGAESLTYAELNERANRLARTLRAEGVEPDQPVGILVHRSLDMIVGIYAILKAGGAYVPIDPEYPADRIRFMLEDSGAKLVLTQSHLAEQASLSFDGQVLILDHEDIYHEDGSNLEPLAGSHHVAYVIYTSGSTGKPKGVMVEHYSVLNRILWMHDRYGLSAEDTILQKTAFTFDVSVWELFWWSMVGSKVSLLSVGGEKNPEDIVETIARDGVSTMHFVPAMLHAFLEYVEQQPREVMQAKLGTLRHVFASGEALPPQHVARFQRLVSSLTGAKLINLYGPTEATVDVSYFDCEPDEEYTVIPIGKPIQNIRLYIVKEGTEQLQPIGVAGELCIGGVGVARGYLNRPELTAEKFVENPFAGGKAGYERMYRTGDLARWMPDGNIEYLGRIDHQVKIRGYRIELGEVESQLLQVESVREAVVVARMDEMGQNHMVAYYVAGQEVEASKLRSELGRELPGYMVPSYFVQLEQLPLTPNGKIDRKALPAPEGSLQTGVDYAEPRTAQERALVAVWESVLGLQTVGILDNFFDLGGDSIKAIQIASRAFQAGYKLDMKDLFQYPTVEALAPHMQEVRRMADQEEVSGETALLPIQHWFFAQERERPQHFNQAVMLYRAEGFEEMAIRQAMDHLVKHHDALRTVFHQTSAGYTAWTRHVEEGTLYTLEMVDYRERAAYAEALEAKATEIQSSMDLSAGPLVKLGWFRTAEGDHLLIAIHHLVVDGVSWRILFEDFSTGYEQAIQGESVRLPYKTDSFQKWARELSSYANRPEAASDEVYWKQLEQVKAEAAPLPKDFAYEGSVNADSEVLTVEWTEAETQQLLKQAHRPYNTEVNDLLLTALGLAVHNWTGAGHVLVNLEGHGREAILPEVDITRTVGWFTSLYPVLLETGKEMTLAERIKETKEGLRRIPHKGLTYGTWRYLSSALPADEVGTIAAEPEISFNYLGQVDQDLQNSGITLSSYRAGETEDAHSPLLYTLDLNAMISEGKLRLTIAYSRKQYRKETLEQVAGLLQSALQEVITHCVAQKQPQLTPSDVSFKGLTTGELEQIAEQAARIGELENVYALTPMQKGMLFYNLMDSQSGAYFEQASFDLRGHFNIAAFAASLDVLVQRHTVLRTNFYSGWKDEPLQVVYRNKRSELYVEDLRDMEDEQQNEYILEFTRQDKQRGFDLAQDVLMRVAVLRTGEESYRFVWSFHHIVMDGWCLSLVTNEVFASYFAILAHKQPELAPVTPYSQYIEWLEQQDRQAASSYWSKVLEGYEEQSRLPQAKIQGKTGYQAERLDFDLGADLTAGIQRIAKRYQVTINTLMQTVWGLLLQKYNGTDDVVFGSVVSGRPADIPNVEHIIGLFINTIPVRIRSQVDSVFSDVMKHIQEQSIASHVYDTYPLYEIQGLSELKQDLINHILIFENYPVEEQIEQLGSSEASSFTITGAESVEQTNYDFNVVVLPGNTIHMSFGYNALAFERESVEQIRGHLVQLLEQVTANPNIRVHELDMVTMQERKQIVEVWGNTAAAYASEQTIHGLFEAQTAQTPEQTALFFEGEQLTYRELNERANRLARTLRSQGVTKDRLVGLMTERSVDMLVGIFGILKAGGAYVPIDPTYPEERIRYMLDDSGAKLLLTQSHLVDKAVIDGQVLVLDGEQSVYHEDGSNLEPLSGPNDLAYVIYTSGTTGQPKGVMLEHHGLCNLKTYFDQTLKIRASDHALLFASYSFDAACWEIFQALFCGATLYVPTTETILNYERFEQYMADHHITVAALPPTYAVYLEPGRMPHLRILFTAGSASSTELVYKWKDQVAYYNGYGPTENSVATSIWPVSEDERAGQLISIGRPVPNHRVYMVDVHGHLAPVGVAGELCVSGPGLARGYLDRPELTAEKFVANPFAAGEAGYERMYRTGDLARWMPDGNIEYLGRIDHQVKIRGYRIELGEVEAQMLKVENVQEVIVLAQADEQGQNQLVAYYVAERDVSAGELRGFLGEELPNYMVPSYFIQLEQMPLTPNGKIDRKALPAPEGSLQSGADYVEPRTALEQTLASIWQSVLGTKNIGILDNFFDLGGDSIKAIQVSSRLLQAGYKLDMKDLFQYPSISLLSGHVHPVSRTADQGEVSGSVKLTPIQQWFFGLSSAEPHYFNQSVMLHRAEGFDIDALHRTVTQVTEHHDALRMVFRQTEQGYEAWNRGVNEGELYHLDVVDLTGVEDTADVMMAIEMKANAIQSSIHLDEGPLVKLGLFRCMDGDHLLIAIHHLVIDGISWRIVFEDFATGYEQAVRGEAIRLPYKTDSFSAWAERLSQYANSPAIDNEREYWQRLAHIEVASLPKDQDKAAGQPFWVRDSETVTVAWNEQETRLLLQESHRAYNTEVNDLLLTALGSALYNWSGQERVLVNLEGHGREAIVPDMDITRTVGWFTSQYPVLLDVDGKAEIGQRIKRVKEDLRHVPHKGIGYGILKYMSSDDATSSWSLQPEISFNYLGQFDQDLEQSDIVLSSHTDGEPMSGYTVLEQPLNVNGMITAGVLTLEIRYDRQVYHQQNVEKFAQLLRESLQEVIKHCASQERSELTPSDVLFKGLSLEQLEQLTEQTASVGELENVYALSPMQKGMLFHSLMEPDSGAYFQQASFDQKGSFDVAVFRKSLDLLTQRHEALRTNFYRFETGHGQEPLQIVFRHKDSDLSYKDVRGMQKAEQQAYIQALKQEDQARGFDLGTDALMRVQVVQTDEETYHWVWSFHHIIMDGWCLSLVTGEVFGTYFALLEQKQPELAPITPYGQYIEWLERQDERAAKEYWSNYLAGFEQQTLLPGSDTASKDQVADSRDNTVSTTASTTSEYVCEKITVELDPTWSEAMYRIAKQQQVTINTLMQSVWGLILQQYNNNEDVVFGSVVSGRPTDIAGVENMIGLFINTIPVRIQSERNATFVDIMRNTQEKALASGVYDSFPLYEIQALTEQKQHLINHIMVFENYPVEEQVEQLGEVRPSAFDITNVEVVEQTNYDLDLIVMPDETFRIMFRYNANVYDRSTIERMQGHVLHVIEQIVNNPHIRVNELELVTPEEQAQIVQIWGDTAAAYPQDQTLSSLFEQQVANTPEQVAVLCGAESLTYAELNERANRLARTLRAEGVEPDQPVGILLHRSLDMIVGIYAILKAGGAYVPIDPEYPADRIRFMLEDSGAKLVLTQSHLAEQASLSFDGRVLVLDREDIYHEDGSNLEPLAGPHHVAYVIYTSGSTGKPKGVMVEHHSVLNRILWMHDRYGLGAENTILQKTAFTFDVSVWELFWWSMVGSKVSLLSVGGEKNPEDIVDTIARDGVTTMHFVPAMLHAFLEYVEQQPREVMQAKLGTLRHVFASGEALPPQHVARFQRLVSSLAGAKLVNLYGPTEATVDVSYFDCEPDGAYSVIPIGKPIQNIRLYIVKEGTEQLQPIGVAGELCIGGVGVARGYLNRPELTAEKFVKDPFAGGEAGYERMYRTGDLARWMPDGNIEYLGRIDHQVKIRGYRIELGEVETQLLQVESVREAVVMARADETGQKHMVAYYVAGQEISASELRSALGQELPSYMVPSYFVQLEQMPLSPNGKIDRKALPAPEGSLQSGADYVPPRTWVEVKLAQIWQDVLGLAQVGVKENFFEIGGHSLRATTLTSKIHQELNKQLPLRSIFEAPTIEQLAAVLEQLDQVAYASIPVTEERSFYPLSSAQKRLYVLHQFDPQDVNYNMPSVLQVSGPLDVKRVEHIFRQLIARHATLRTRFELIDSEPMQWIEDTVPFEVEYTKVQAEGATADTDQDTTTDTYTRVNIEAQQLVRRFVRPFDLKAAPLLRVGLVDLGLQGVEQESQHLLMLDMHHIVSDGVSLEVLTDEFVRLYGGEELAPLRIQYKDYAVWQQSEAHQEWMQRQEAYWLNTFRGELPVLDLSTDFARPAVQSTAGDTIEFVLEREVSERLKELAAQTGSTLYMVMLAAYTTLLHKYTGQEDIVVGTPIAGRPHAELSNLVGVFINTLAIRNYPSGDTSFLEYLQEVKEQALNAYEHQDYPFEELVEKLNLTRDTSRNALFDTMFELKTWEQREFELEGLTLSSYPLDNQTAKFDLSLEAIEQPEGILCSLEYSTVLYKRETMTRLAQHFAEIVRAIAYHPQQPLAVLNMVTDEEQEQLIYGFGEVGVSDVAVEAGALFHTYVEKQAQLIPDQVAVVYEGQQLTYRKLNERANQLARRLRNEGIGRESIVGILSERSVDMLVGVLAVWKAGGAYVPLDADYPSERIRFMLEDSGATVLLTQTGLQERAQAWLNESQWTLGDEKAKGELETAVSAETMERDNLNEGLSLKSDSKSDSEAASESATKLRLQIMLALDDESLYTGDTTDVDHINEPQDLAYVIYTSGTTGRPKGVMIEHRCLVNTAAAYRRDYRLSEFPVRLLQLASFSFDVFVGDMARTLYNGGTMVICPKDDRLDFSRLHGWIRDYQITVFESTPALIVPFMQHVHEQGLDMSSMELLITSSDSCSVTDYRVLQERFGADIRIMNSYGVTEAAIDSSFYDEELSKLPSSGHVPIGQAWLNARFYIVDSQLNPVPIGVLGELCIGGIGVARGYLNRADLTAEKFVANPYVPGERLYRTGDLARWMPDGNVDFIGRMDDQVKIRGFRIELGEVEAQLLTVDGIEKAIVTAWENENGDKDLCAYVVASEALNLPELRSILQPKLPGYMIPTYVVPLDQFPLTPNGKIDRKALPAPEARLEGGTEYVAPRTPLEEQLVRIWQSVLNHQRVGIQDNFFEVGGHSLRATTLMAKIHQELNHKLALRDIFQYPTIEQLVQVMGEDQTQQMYVSIPVAEEREYYPVSSAQKRMYVLSHLEGGEVSYNMPGALIIEGSLDKKRLEQAFRQLIARHETLRTRFEMVDGEVIQRIESNVPFSVEYVQASEEETPQYAQDFVRAFDLAQAPLLRVQLIENGPGRHVMLYDMHHIISDGVTEGIIVQEFSQLYEGKELPPLRIQYKDYAVWQHADMQSERLRAQESYWLNTMSGEIPALDMPTDFTRPAVQRLEGTRFEFAICMEDSEQLKQLAAQTGSTLYMVLLAAYSTLLHKYTGQEDIIVGTPIAGRPHAELGSLVGVFLNTLAIRNYPSGDKTFLDYLQEVKEHALSAYEHQEYPFEELVEKLNVTRDTSRNALFDTMFELKTFEQQEFELEGLTFKPYPTDDHTSKFDLTLDAVEQSEGILCSLEYSTALYKPETIARFAQHFTELVRAITLHPQQSLSALDMVTVEEKAQIIYGFGDVGVSDVATVEAEALFHVFVEEQAQLVPDHVAVVYEEQQLTYRTLNERSNQLARRLRNEGIGRESIVGIWSERSVNMLVGVLAVWKAGGAYVPLDADYPSERIRFMLEDSGATVLLTQTSLQERAQAWLEKSDQALVEGQTEGELETAAGAETMESGALHGNLNGTADSKSDSEAASESATGLRLHTVLALDDESLYTGDTTDVEPINEPHDLAYVIYTSGTTGRPKGVMIEHRSLVNTAAAYRRDYRLNQFPVRLLQLASFSFDVFVGDIARTLYNGGTMVICPKDDRIDPSRLYGWIRDYQITVFESTPALIVPFMQHVHEQGLDMSSLELLITSSDSCSVTDYRVLQERFGANIRIMNSYGVTEAAIDSSFYDEELSKLPSSGHVPIGQAWLNARFYIVDSQLNPVPIGVLGELCIGGIGVARGYLNRADLTAEKFVANPYVPGERLYRTGDLARWMPDGNVDFIGRMDYQVKIRGYRIELGEIETAIQRVPGVRQAVVIDRTDERGHKYLCGYITGETEELRIEEIQAALEAGLPAHMVPARLMRLEAIPLTSNGKIDRKALPEPEGSIHTGAAYVAPRTKVEQVLAAVWTGVLSVEAVGTQDNFFELGGDSIKALQVSSRLLQAGYRLEMKDLFSHPTVSALALKVQSVTRLADQSEVVGTVKLTPVQHWFFEQNLTDAHHHNQSIMLHSKDGFNVAALRTAMDQMVSHHDALRIVFRLTEHGYEAWNRAVGEGELYTLERIDFSHETEVSAAIEAKVNEIQAGIHLSEGPLVKLGLFHCPDGDHLLMAIHHLVVDTVSWRILFEDLTTAYEQALHGQAARLPHKTDSFRNWAEAQSHYANGPAMEAEFSFWKEVEQGRYEPLPKDQPQSSSLNKDSELMTVTWTTQETEQLLKQAHRAYNTDMNDLLLTALGLAIHRWAGIERVLVNLEGHGRESILPELDITRTVGWFTSQFPVVLDMSAGQDLSQRIKQVKEGLHRIPQKGIGYGMLRYLSAACEQAHFGTEPEISFNYLGQFDQDMQHQSIGVSPYASGAELSAHAARSHTLDLNGLISEGQLQLTISYSHQEYRKETMEQLAEALRTSLQEIIAHCAGRKQQELTPSDVMLKPVTLAELDQLVERTRDIGELENVYALTPMQKGMLFHSLMDAESGAYFEQTTFDLHGRFQADIFQDSLNQLAQRHEIFRANFISGWQDEPVQVIFRHKEVGFRCEDLRHLDDQERDAYVQEFIRQDKAAGFDLSRDALMRVAILRTGDEDYYFVWSSHHILMDGWCVALVTDEVFEVYFAAVEHRAPKLPPVTPYSQYIAWLEAQDVEAAASYWKEYLLGYDQQTSIPTGKVGAKADGEQFEHVLCDLGKDLTGRMEMVAKQYHVTTNTLLQTAWGLLLQKYNGSNDAVFGGVVSGRPADISGIENMVGLFINTIPVRIRSKAEDTFADLIRANQQQALASQDYETYPLYEIQALTEQKQELIQHIIVFENYPVEEQVEQLGEGAESDFVISNAGMIEQTNYDFNLVVMPQEAMKIRFEYNAKLYDREAVERTQGHLVQLLEQVVAQPDIQVQELDVLSEQEREQILRVWGDTAAEYPSDQTIHGLFEAQAVQTPEQPALYFEGEQLTYRELNERANRLARTLRSQGVTKDRLVGLMTERSVDLIVGMLGILKAGGAYVPIDPTYPEERIRYMLDDSGAELLLTQSHLVDKVAFDGQVLVLNGAESVHHEDGSNLEPLSGPNDLTYVIYTSGTTGQPKGVMVEHRNVVRLVKNTNYAQLDADTRILQTGAIVFDASTFEIWGALLNGGQLVLVSQDVILDALKLNEAVRSHGITTMFLTTPLFNQLSQQNLALFEGVRELLVGGDVMSVPHMNRVLEAHPSLRISNIYGPTENTTFSTVHAITGVQSESVPIGRPIHNSTAYVVDRSMRLQPVGVWGELLVGGDGVARGYRNRPDLTSEKFIDSPFRSGERCYRTGDMVRLNADGSLEYKGRIDAQVKIRGYRIELGEVETQLLKLEAVREAVVIAWEDEQGQKQLCAYVVADEEVVASELRSALSQKLPGYMIPSYVIQLEQMPLTPNGKIDRKALPAPEGSLQSGADYVAPRTWVEVKLAQIWQDVLGLTQVGVKENFFEIGGHSLRATTLASKIHKELNKPLPLRSIFEAPTIEQQAVVLEQLDQVTYASIPVTEKRSFYPLSSAQKRLYVLHQFDPYDVNYNMPSVLQVSGPLDVKRVEHAFRQLIARHASLRTRFDLIDSEPMQWVEDTVPFEVEYTKVQAEGATTDTDTRVGKKVDELVSRFVRPFDLKAAPLLRVGLVDLGVQGVEQESQHLLMLDMHHIVSDGVSMGVLTNEFVRLYDGEELPPLRIQYKDYAVWQQSEAHQEWMQRQEAYWLDTFRGELPVLDLPTDFARPAVRSTAGDIVVFGLEREVSERLKELAAHTGSTLYMVLLAAYTALLHQYSGQEDIVVGTPIAGRPHADLEPILGMFVGTLALRNYPTAEHTFRSYVEEVKVRALQAYEHQDYPFEELVEKLNVKRDMSRHPLFDTMFTLQTTEEGELQLANLSFRPYGLEQTPAKFDLTLEAREEEAGIQFGLQYATALYQRETVERMTRHFIRLAEAVAVNPDAKLGELELITTEETEQILKVFNDPNAHSVRGTLQGLSLSERFEEQAKNHPERIAVVSGDMALTYAELNEQANQLARVLRAKGVEADHPVGILLERSADLLVSILAVLKAGGAYVPMDTMYPQERIDYMLQDSGAKVVITSRAANLSLQLPSTVQAIVLDDEDVQAQLGAQDASNLIPVAGLYNLAYMIYTSGTTGQPKGVMIEQGSVSNLVDALYERVYSRYDQPLHIAWLSAFVFDASVKQIFASLLLGHTLHVVSRDVSLSGEHLIAYYRTHRIDLSDGTPAHLHILNESVNVTEAPDVKHYLIGGEALSVQLVQGFLHKWSGYRPVITNVYGPTEATVDATAYTIEGVESLNGLLEKGEHTVSIGTPIANQAVYILNTRQQLVPIGIAGELYIGGAGIARGYLNLPELTAEKFIPNPFASAPLEVEQAPNAHSNLMYRTGDLARWLPDGSIEYLGRIDHQVKIRGYRIELGEVEAQLLTVDGIQKAVVTAWENEDGHKDLCAYIVASESLSLPELRNALQPKLPDYMIPTYVVQLDRFPLTPNGKIDRKALPAPEARLEGGLEYVAPRTPLEAKLAQIWQDVLKLSSVGVTDSFFDVGGHSLRATTLVAKIHQELGSRMTLREVFQHFTIEQQAQLIATHGTDTYTVIPAATKQSYYPVSSAQKRLYILSHLEGGDLSYNMPGVLTVEGPLQADRLEEAFRQLVARHETLRTSFEMVDGEVVQRIYDQVEFVVERLQASESEAEVYIESFVRSFDLRQAPLLRVRLIQTGPERHLLMYDMHHIISDGVSSNNIVQELGQLYEGQALEPLPIQYKDYAVWQQQEMHRESYQRREQFWLEHLAGELPVLDLPIAYPRPAVRSFEGAMYEFTVAPNVSEQLHRIAAQTGSTLYMVLLSAYTVLLSKYSGQDDLIIGTPVAGRLLPELEPLIGMFVNTLAIRHQPQGNQTFHNYLLEARDRTLQAFEHQDYPLEELVEKLDVARDASRNPLFDTVFVLENTESQEAQLETLSFSPYVKEHRTSKFDLTLSMSDEDGQIKGSFEYCTKLFGADAIERLIGDLIAILSQVGANPDLLLSDLQVNSDEQAEGFSPDSIDFIF

SEQ ID NO: 410 - protein, 14129 aa, Paenibacillus polymyxa
  REGION 1..14129: note = strain LU17007
MTQQDVQLFSLSQPQQRIWYTELLYPHRNTSTIIATVKIRGTVRIDALQQAMNRVIAQNDSFRIKITAQDGIPYQYVEPFTVESIETLQVTPEEANEWLKRHNPQPFSLLDSQLYRFVILQLGAEETWFNFKMHHIISDGVSMNQAINEITGHYMDIVHGTGQDAPSKSNPYLDFIQVEQSYEQSDRYQKDKTYWTEKFADLPETTGLKSYNPLTLSTAARRESFILEHGLYRGVTAFCEEHKISIFTFFLAALYIYLHKVTGEQDLTVGTLYANRTSKKEKDTIGMFVSTVATRLLVEPESELLAFLQGVGKEQASILRHQRYPYNKIIQDLREQQSSMDIQRLFGASIQYRTLSFSRFDEAIQQVDNDFCGDTVNDFDIHMVEMLDDDRLVLYLDYRTELFSEQEIARIIRQFLSVAEHMVQGPHKRIQELSLISEEERAEIVDVFNATTVEYPHEAGIHELFEEQAARTPNQTAVVSDNAYLTYGELNVKANRLAHTLRGHGVTVERTVGIVAERSADMIVGMLAILKAGGAYVPIDPDYPAERVRYLLEDSGAELLLVQHAEQQPEDYTGIVLDLSDAAVYGTKNNQDVNNIHGEQNEASHADFTHYLNLKNENLKESSSSVVDSTTGAHTFGNRLAYLMYTSGTTGQPKGVMVEHRNVVRLVKNTNYAQLGADTRILQTGAVVFDASTFEIWGALLNGGQLVLVSQDVILDAPKLKEAVRSHGITTMWLTAPLFNQLSQQDLELFEGVQELLVGGDVLSVPHINRVLEAHPSLRIINGYGPTENTTFSTTHAIAGVQSEAVPIGRPIYNSTAYVVDRSMQLQPVGAWGELIVGGDGVARGYRNRPDLTAEKFIDSPFRSGERCYRTGDLVRWNEDGTLEYKGRIDAQVKIRGYRIELGEVEAQLLKLEAVQEAVVIAREDEQGQKQLCAYVVTLADITASELRSDLSQELPGYMVPSYFVQLEQLPLTPNGKVDRRALPQPEGSVDSGEDYVAARNEVERTLVSVWQSVLGIEQIGVLDNFFHLGGDSIKAIQVSSRLLQNGYKLEMRELFQYPTIAELNGRVQRVTRVSDQREVRGNVALTPIQHWFIEQQPSHPEHYNQALMLHREDRLDETALHQTLQRIVEHHDALRIVFRQNADGGYEAWNRGVQEGELYSLEVMDYTTESDFAHLLENKASEIQSSIRLDEGPLVKLGLFRCIDGDHLLVAIHHLVVDGVSWRILLEDLASGYEQALRDESVRLPNKTDSFRLWADQLAAYANSTALEKERAYWEQVERAGAAQEALPKDYTRKSQAKPQLRDDRTLTVAWTVEETEQFLKQAHRAYNTEANDLLLTALGIAIQEWAGIRQVLVNLEGHGREAILPDMDITRTVGWFTSQFPVVLDMGEDRNVGQRVKNVKEGLRRLPHKGIGYGILRYLADREGKAAFVAEPEISFNYLGQFDQDLKNNAFRMSPYSIGASMSDTLTKRYALDINGMITDGALELTISYSNKMFMKKSIKKLADLLQESLREVLAHCVVKELPELTPSDLSFQGLTAGELDHIVEQTAAAGELENIYSLTPMQKGILFHGLMEPQSGAYFEQATFDLQGSFQVEAFAESLNQLVDRHQIFRTNFYSGWNEQPLQVVYRHKHAGFRFEDIRLMGQEEQDAYIADFAERDKGEGFHFSSGELMRVSILRTGEESYRFVWSFHHILMDGWCLFLVVGEAFNTYFAILEDRKPELVPVTPYSEYIEWLDRQDKTEAERFWRDYFAGFEQQTVLPQVKQLDGHAKAYEADKLSFTLGREVTERMNKLVKQKQVTVNTLLQAAWGVVLQRYNNSRDVVFGSVVSGRSADIPGIDKMIGLFINTVPVRIHSEKDMTFAGLMKQIQEQALASRAYETYPLYDIQALTEQKQDLVNHIIVFENYPVEQRMEQMGSRGANGFTIANASMSEQTNYDFNITVVPGDEIHFHLEYNARVLERAAVEQIREHLLHMIEEAIHRPDARVDELELVTAAEKAKIIDGFGSVGVAAWTDEKESNLLFHAYVEEQAQLVPDHVAVVYEERQFTYRELNERGNQLARRLRNEGIGRESIVGILSERSVDMLVGVLAVWKAGGAYVPLDADYPSERIRFMLEDSGATVLLTQTGLQERAQGWLEASRQALVGGQTEGELETAAGAETMERDSLNEGVSLKSDSKSDSEAVSEPATGLRLRTVLALDDESLYTGGVTDIEPINEPHDLAYVIYTSGTTGRPKGVMIEHRSLVNTAAAYRRDYRLNQFPVRLLQLASFSFDVFVGDMARTLYNGGTMVICPKDDRIDPSRLYGWIRDYQITVFESTPALIVPFMQHVYERGLDMSSLELLITSSDSCSVTDYRVLQERFGADIRIMNSYGVTEAAIDSSFYDEELSKLPSSGHVPIGQAWLNARFYIVDSQLNPMPIGVLGELCIGGAGVARGYLNRADLTSEKFVANPYVPGERLYRTGDLARWMPDGNVDFIGRMDYQVKIRGYRIELGEIETAIQRVPGVRQAVVIDRTDERGHKYLCGYITGETELRIEEVQAELEAGLPAHMVPARLMRLETIPLTSNGKIDRKALPEPEGSIHTGAAYVAPRTQVEQVLAAVWAGVLGVEAVGTQDNFFELGGDSIKALQVSSRLLQAGYRLNMKDLFSNPTVAALSPLLRTDGKMASQEEAVGPVELTPIQRWFFEQQPADLHHSNQAMMLYRAGRFDVDALRRTMDRMVQHHDALRTVFRETGQGYVAWSRSVAEGELYTLDIVDFSAVEDESTAVEAKASEIQASIHLSEGPLVKLGLFHCAEGDHLLIVIHHLVVDGVSWRILLEDLASGYEQAVAGQTGTAIRLPHKTDSFQVWAKQLSAYANSATMERELAYWQHIEQAEASLVKPLPKDFANDNALLGDSEVVTIRWTKQETEQLLKQAHRTYNTEMNDLLLAALGKAVYDWSGSERVLVNLEGHGREAIVSDVDITRTVGWFTSQFPVVLDGSLGQGGHTARLIKRIKEGLRHIPQKGIGYGILRYLSDMNMLEKAGVRLQAQPKISFNYLGQFDQDYKGNDLQPSAYSIGVPVSTNATMDFALDINGVIEDGELMFTIRYGTTQFRHETIERLGELLASSLREVIHHCVAQERTMLTPSDVLLNHVTLDELEQLVEDTRDLGELENVYALTPMQKGMLFYSLMDENSAAYFEQATFELNGRFDVVTFGKSFDLLVQRHEALRTNFISSWKDEPVQVVFRNRSGQLYYEDLRGLEKEERAARVEAFVIEDKAKGFHLAEDALIRVSILQTGDETYHFVWSFHHILMDGWCLSFITQEVFGSYLALRAGHEPALEPVTPFSRFIEWLERQDREAALQYWSGYLADYEQQITLPQQKTQSKSLQSGEYVAEDLECNFQPELVAQIERVAKQNQVTINTLIQTVWGVLLQKYNNSTDVVFGSVVSGRPGDIPGVEHMIGLFINTIPVRVQSEQGETFVELMKRTQQQALASNAYDAFPLYEIQALTEQKQDLINHIMIFENYPVGQQVEQLGSEGQDKFTISNVVATEETNYDLNVAVMPGEGIKIRFMYNALSFDQAGIERLHGHLARLLEQISLNPHVRVEELELVTAAEKQQITGAFNATASAYPSHQTIQKLFEEQAERTPDHVAVVWEHQSLTYRELNERANRLARTLRTEGVESEQPVGILAQRSLDMIVGIYAILKAGGAYVPIDPEYPADRIRFMLEDSGAKLVLTSSHLAEQASLSFDGQVLVLERNDIYHEDSSNLEPLSGPHHVAYVIYTSGSTGKPKGVMVEHHSVLNRILWMHDRYGLSAEDTILQKTTFTFDVSVWELFWWSMVGSKVSLLSVGGEKNPEDIVDTIARDGVTTMHFVPAMLHAFLEYVEQQPREVMQAKLGTLRHVFASGEALPPQHVARFQRLVSSLAGAKLINLYGPTEATVDVSYFDCKLDEEYTVIPIGKPIQNIRLYIVKEGKEQLQPIGVAGELCIGGVGVARGYLNRPELTAEKFVADPFAGGEAGYERMYRTGDLARWLPDGNIEYLGRIDHQVKIRGYRIELGEVETQLLQVESVREAVVMARADETGQNQMVAYYVAGQELSASELRSELGRELPSYMVPSYFVQLEQMPLSPNGKIDRKALPVPEGSLQSGAEYVEPRTGAERALVAIWQSVLNVQTVGILDNFFDLGGDSIKAIQFSSRLLQAGYKMDMKDLFKFPNVKELAPHLRLADKQTTEQGEVTGKVALTPTQYWLAEQGQVHAYPFNQAVMLHLEQGFDESALRQALMKLTEHHDALRMVFRKTEQGYEAWNRGVHEGELYHLDVLNFRDVTDEALLSATIEAKVSEIQSSIYVHEGPLFKAGLFHCADGDHLLIAIHHLVADGGSWRILLEDLATVYEKAVHQEVLQLPDKTDSFRSWSQRLYTYANSAALEGERAYWEHLNASALADQVRLPEDQAQDGKFILADTGKMVVKLSEEETERLLKQAHRAYNTEVNDLLLTALSMMLYTWTGHERSLINLEGYGREGILPDTDLSRTVGCFTVQYPIWLNIGSDSTLSGRIKQVKESLRDIPNKGIGYGIWRHLNESGQATGQQADALNLGQHQAFAEPQVSLSYHGQFDQELQNSDIRMSPYSIGSVVSGQLEMKYDFIVDASVTNGILKLDIRYNSKVFRKDTIQMLANLLKANLLEIIEHCVAREQNELTPSDVLFKGLTLEQLDTIKEQTKTVGELEDVYPLTPMQKGMLFHSLMNTQTEVYFEQLTFDLEGEFEPSMFEESVKLLVSRHAIFRTNFYSGWHGQPLQVVYRHKNPSFRYEDARGREHTVAEFVTQDKARGFDLGKDALMRIAVFRTGDCSYRFVWSFHHILMDGWCLSLVMEEVLSAYSSLMKNRQPELPPVRSYSRYIEWLEQQKAQEAARYWSDYLAGYEQQTLLLGEKAQASVTVQNEDADGSDGRSDTGYVLEKVTFGLGKERSTALKRIAKQQKVTINTILQSAWGVILQKYNNNQDVVFGSVVSGRPAEVAGVESMIGLFINTIPVRIYSERNATFAEILKRTQEQALSSGPYDTFPLYDIQALTEQKQDLINHIMVFENYPIGQKISQAIDSGEADAHTGLSIANVAIAEQTNYDFNLIVVPDEDITILLEYNELVYNRSEMQRIKGHIEHVIRQIVENPNIRVSELELITSEEQAQIIQVWGDTATAYPQDQTLSAVFEEQVAQTPDQVALMFGHQSLTYRELNERANSLARILQAQGVGPDKLVGLMVHRSVEMIVGLLAVLKAGGAYVPIDPEFPSSRIQYMLEDSEATVLLTSRDLLEEHHCNANAIFIEDAELYQGESSNLEAIARPEHLAYVIYTSGSTGNPKGVMLQHRSVLNFITGMREAIDFETSQTILSLTTISFDIFVLETILPLLGGMTVVLGDRQHQVNPQALGELITHHHIEMLQMTPSRVQMLLSHETGSHALQSVKAIMVGGEALPSKLLGDLQKINGPRIYNMYGPTETTVWSTVQELTHAHQINIGRPIANTQIYIMNADGGLQPIGVPGELCIAGEGLARGYWKREELTAEKFVENPFAGGKAGYERMYRTGDLARWMPDGNIEYLGRIDHQVKIRGYRIELGEVESQLLQVESVREAVVVARMDEMGQNHMVAYYVAGQEVEASKLRSELGRELPGYMVPSYFVQLEQLPLTPNGKIDRKALPAPEGSLQTGVDYAEPRTAQERALVAVWESVLGLQTVGILDNFFDLGGDSIKAIQIASRAFQAGYKLDMKDLFQYPTVEALAPHMQEVRRMADQEEVSGETALLPIQHWFFAQERERPQHFNQAVMLYRAEGFDETAVRQAMDHLVKHHDALRTVFHQTSAGYTAWTRHVEEGTLYTLETLDYRERAAYAEALEAKAMEIQSSMDLSAGPLVKLGLFCTTEGDHLLIAIHHLVVDGVSWRILFEDFSTGYEQAIQGEPVRLPYKTDSFQTWARELSSYANRPEAVSDEVYWKQLEQVKAEAAPLPKDFAYEGSVNADSEVLTVEWTEAETEQLLKQAHRAYNTEVNDLLLTALGLAVHNWTGAGHVLVNLEGHGREAILPEVDITRTVGWFTSLYPVLLETGKEMTLAERIKETKEGLRRIPHKGLTYGTWRYLSSALPADEMDTIAAEPEISFNYLGQVDQDLQNSGITLSSYRAGETEDAHSPLLYTLDLNAMISEGTLRLTIAYSRKQYRKETLERVAGLMKSALQEVITHCVAQERPELTPSDVSFKGLTTGELEQIAEQAARIGELENVYALTPMQKGMLFYNLMDSQSGAYFEQASFDLRGHFNIAAFAASLDVLVQRHTVLRTNFYSGWKDEPLQVVYRNKRSELYVEDLRDMEDEQQNEYMLEFTRKDKQRGFDLAQDALMRVAVLRTGEETYRFVWSFHHIVMDGWCLSLVTNEVFASYFAILAHKQPELAPVTPYSQYIEWLEQQDRQAASSYWSKVLEGYEEQSRLPQAKIQGKTGYQAERLDFDLGAELTAGIQRIAKRYQVTINTLMQTVWGLLLQKYNGTDDVVFGSVVSGRPADIPNVEHIIGLFINTIPVRIHSQVDSVFSDVMKHIQEQSIDSHVYDTYPLYEIQGLSELKQDLIHHILIFENYPVEEQIEQLGSSEASSFTITGAESVEQTNYDFNVVVLPGNTIHMSFGYNALAFERESVEQIRGHLVQLLEQVTANPNIRVHELDMVTMQERKQIVEVWGNTAAAYASEQTIHGLFEAQTAQTPEQTALFFEGEQLTYRELNERANRLARTLRSQGVTKDRLVGLMTERSVDMLVGIFGILKAGGAYVPIDPTYPEERIRYMLDDSGAKLLLTQSHLVDKAVIDGQVLVLDGEQSVYHEDGSNLEPLSGPNDLAYVIYTSGTTGQPKGVMLEHHGLCNLKTYFDQTLKIRASDHALLFASYSFDAACWEIFQALFCGATLYVPTTETILNYERFEQYMADHHITVAALPPTYAVYLEPGRMPHLRILFTAGSASSTELVYKWKDQVAYYNGYGPTENSVATSIWPVSEDERAGQLISIGRPVPNHRVYMVDVHGHLAPVGVAGELCVSGPGLARGYLDRPELTAEKFVANPFAAGEAGYERMYRTGDLARWMPDGNIEYLGRIDHQVKIRGYRIELGEVEAQMLKVENVQEVIVLAQADEQGQNQLVAYYVAERDVSAGELRGFLGEELPNYMVPSYFIQLEQMPLTPNGKIDRKALPAPEGSLQSGADYVEPRTALEQTLASIWQSVLGTKNIGILDNFFDLGGDSIKAIQVSSRLLQAGYKLDMKDLFQYPSISLLSGHVHPVSRTADQGEVSGSVKLTPIQQWFFGLSSAEPHYFNQSVMLHRAEGFDIDALHRTVTQVTEHHDALRMVFRQTEQGYEAWNRGVNEGELYHLDVVDLTGVEDTADVMMAIEMKANAIQSSIHLDEGPLVKLGLFRCMDGDHLLIAIHHLVIDGISWRIVFEDFATGYEQAIRGEAIRLPYKTDSFSAWAERLSQYANSPAIDNEREYWQRLAHMAVASLPKDQDKAAGQPFWVRDSETVTVAWNEQETRLLLQESHRAYNTEVNDLLLTALGSALYNWSGQERVLVNLEGHGREAIVPDVDITRTVGWFTSQYPVLLDVDGKAEVGQRIKRVKEDLRHVPHKGIGYGILKYMSSDDATSSWSLQPEISFNYLGQFDQDLEQSDIVLSSHTDGEPMSGYTVLEQPLNVNGMITAGVLTLEIRYDSQVYHQQNVEKFAQLLRESLQEVIKHCASQERSELTPSDVLFKGLSLEQLEQLTEQTASVGELENVYALSPMQKGMLFHSLMEPDSGAYFQQASFDQKGSFDVAIFRQSLDLLTQRHEALRTNFYRFETGHGQEPLQIVFRHKDSDLSYKDVRGMRKAEQQAYIQALKQEDQARGFDLGTDALMRVQVWQTDEETYHWVWSFHHIIMDGWCLSLVTGEVFGTYFALLEQKQPELAPITPYGQYIEWLERQDERAAKEYWSSYLAGFEQQTLLPGSDTASKDHVTDSREHAVSSTASEASEYVSEKVTVDLDPTWSEAMYRIAKQQQVTINTLMQSVWGLILQKYNNNEDVVFGSVVSGRPTDIAGVENMIGLFINTIPVRIQSERNATFVDIMRNTQEQALASGVYDSFPLYEIQALTEQKQNLINHIMVFENYPVEEQVEQLGEVRPSAFDITNVEVVEQTNYDLDLIVMPDDTFRIMFRYNANVYDRSTIERMQGHVLHVIEQIVNNPHIRVNELELVTPEEQAQIIQVWGDTAAAYPQDQTLSALFEQQAAITPDQAAVIFGSEMLTYRELNERTNRLARTLRAEGVEPDQPVGILVHRSLDMIVGIYAILKAGGAYVPIDPEYPADRIRFMLEDSGAKLVLTQSHLAEQASRSFDGQVLVLDRQEQAGKNIYHEDGSNLEPLAGPHHVAYVIYTSGSTGKPKGVMVEHHSVLNRILWMHDRYGLGAEDTILQKTAFTFDVSVWELFWWSMVGSKVSLLSVGGEKNPEDIVDTIARDGVSTMHFVPAMLHAFLEYVEQQPREVMQAKLGTLRHVFASGEALSPQHVARYQRLVSSLAGAKLVNLYGPTEATVDVSYFDCEPDGAYSVIPIGKPIQNIRLYIVKEGTEQLQPIGVAGELCIGGVGVARGYLNRPELTAEKFVADPFAGGEAGYERMYRTGDLARWMPDGNIEYLGRIDHQVKIRGYRIELGEVETQLLQVESVREAVVMARADETGQKHMVAYYVAGQEISASELRSALGQELPSYMVPSYFVQLEQMPLSPNGKIDRKALPAPEGSLQSGADYVPPRTWVEVKLAQIWQDVLGLAQVGVKENFFEIGGHSLRATTLTSKIHQELNKQLPLRSIFEAPTIEQLAAVLEGLDQVAYASIPVTEERSFYPLSSAQKRLYVLHQFDPLDVNYNMPSVLQVSGPLDVKRVEHIFRQLIARHATLRTRFELVDNEPMQWIEDTVPFEVEYTKVQAEDVIADTDQDTTTDTYTRVNIEAQQLVRRFVRPFDLKAAPLLRVGLVDLGVQGVEQESQHLLMLDMHHIVSDGVSLEVLTDEFVRLYGGEELAPLRIQYKDYAVWQQSEAHQEWMQRQEAYWLSTFQGELPVLDLSTDFARPAVQSTAGDTVEFVLEREDSERLKELAAQTGSTLFMVMLAAYTTLLHKYTGQEDMIVGTPIAGRPHAELESLVGVFINTLAMRNYPSSDKSFLDYLQEVKEHALRAYEHQDYPFEELVEKLNLTRDTSRNALFDTMFELKTLEQREFELKGLTLSSYPLDNHTAKFDLSLEAIEQPEGILCSLEYSTALYKRETMTRLAEHFAEIVRAIAYHPQQPLAVLNMVTDEEQEQLIYGFGEVGVTDVAAVGVGALFHTYVEEQAQLIPDHVAVVYEEQQLTYRKLNERANQLARRLRNEGIGRESIVGILSERSVDMLVGVLAVWKAGGAYVPLDADYPSERIRFMLEDSGATVLLTQTGLQERAQAWLNESQWTWGDEKAKGELETAVSAETMERDNLNEGLSLKSDSKSDSEAASESATKLRLQIMLALDDESLYTGDTTDVDHINEPQDLAYVIYTSGTTGRPKGVMIEHRSLVNTAAAYRRDYRLSEFPVRLLQLASFSFDVFVGDMARTLYNGGTMVICPKDDRLDFSRLHGWIRDYQITVFESTPALIVPFMQYVHEQALDMSSLKLLITSSDSCSVTDYRVLQERFGANIRIINSYGVTEAAIDSSFYDEELSKLPSSGHVPIGQAWLNARFYIVDSQLNPVPIGVLGELCIGGAGVARGYLNRADLTAEKFVANPYVPGERLYRTGDLARWMPDGNVDFIGRMDDQVKIRGFRIELGEVEAQLLTVDGIEKAIVTAWENENGDKDLCAYVVASEALNLPELRSTLQPKLPGYMIPTYVVPLDQFPLTPNGKIDRKALPAPEARLEGGTEYVAPRTELEEQLVRIWQSVLNHQRVGIQDNFFEVGGHSLRATTLMAKIHQELNHKLALRDIFQYPTIEQLVQVMGEDQTQQTYVSIPVAEERDYYPVSSAQKRMYVLSHLEGGEVSYNMPGALIIEGSLDKERLEQAFRQLIARHETLRTRFEMVDGEVIQRIESNVPFSVEYVQASEEETPQYAQDFVRAFDLAQAPLLRVQLIENGPGRHVMLYDMHHIISDGVTEGIIVQEFSQLYEGKELPPLRIQYKDYAVWQHADMQSERLRAQESYWLNTMSGEIPALDMPTDFTRPAVQRLEGTRFEFAICMEDSEQLKQLAAQTGSTLYMVLLAAYSTLLHKYTGQEDIIVGTPIAGRPHAELSSLVGVFLNTLAIRNYPSGDKTFLDYLQEVKEHALSAYEHQEYPFEELVEKLNVTRDTSRNALFDTMFELKTFEQQEFELEGLTFKPYPTDVHTSKFDLTLDAVEQPEGILCSLEYSTALYKPETIARFAQHFTELVRAITLHPKQPLAALDMVTVEEKAQILYGFGDVGVSDVTAVEAGALFHTYVEEQAQLVPDHVAVVYEEQQLTYRTLNERANQLARRLRNEGIGRESIVGIWSERSVNMLVGVLAVWKAGGAYVPLDADYPSERIRFMLEDSGATVLLTQTSLQERAQAWLEKSDQALVEGQTEGELETAAGAETMESGALHGNLNGTADSKSDSEAASESATGLRLHTVLALDDESLYTGDTTDVEPINEPHDLAYVIYTSGTTGRPKGVMIEHRSLVNTAAAYRRDYRLNQFPVRLLQLASFSFDVFVGDIARTLYNGGTMVICPKDDRIDPSRLYGWIRDYQITVFESTPALIVPFMQHVHEQGLDMSSLELLITSSDSCSVTDYRVLQERFGANIRIINSYGVTEAAIDSSFYDEELSKLPSSGHVPIGQAWLNARFYIVDSQLNPVPIGVLGELCIGGIGVARGYLNRADLTAEKFVANPYVPGERLYRTGDLARWMPDGNVDFIGRMDYQVKIRGYRIELGEIETAIQRVPGVRQAVVIDRMDERGHKYLCGYITGEAELRMEEVQTELEAGLPAHMVPARLMRLETIPLTSNGKIDRKALPEPEGSIHTGAAYVAPRTKVEQVLAAVWAGVLGVDAVGTQDNFFELGGDSIKALQVSSRLLQAGYRLEMKDLFSHPTVSALALKVQSVTRLADQSEVVGAVKLTPVQHWFFEQNLTDAHHHNQSIMLHSQDGFDEVALRTAMDHIVSHHDALRIVFRLTEHGYEAWNRAIGEGELYTLERIDFSHETEVSAAMEAKVNEIQAGIHLSEGPLVKLGLFHCPDGDHLLMAIHHLVVDTVSWRILFEDLTTAYEQALHGQAARLLHKTDSFRTWAEAQSHYANGPEMEAELAFWQDVEQGRYEPLPKDESPSHSLNKDSELMMVTWTAQETEQLLKQAHRAYNTDMNDLLLTALGTAIHRWAGIERVLVTLEGHGRESILPELDITRTVGWFTTQFPVVLDMSAGQDLSQHIKQVKEGLRRIPQKGIGYGMLRYLSAACEQAHFGTEPEISFNYLGQFDQDMQHQSIGVSPYASGAELSAYAARSHTLDLNGLISEGQLQLTISYSHQEYRKETMEQLAEALRTSLQEIIAHCAGRKQQELTPSDVMLKPVTLAELDQLVERTRDIGELENVYALTPMQKGMLFHSLMDAESGAYFEQTTFDLHGRFQADIFQDSLNQLAQRHEIFRANFISGWQDEPVQVIFRHKEVGFRYEDLRHLEDQERDAYVQEFIRKDKVAGFDLSRDALMRVAILRTGDEDYYFVWSSHHILMDGWCVALVTDEVFEAYFAAVEHRALKLAPVTPYSQYIAWLEAQDVAAAASYWKEYLLGYDQQTSIPTGKVGAKAEGEQFEHVLCDLGQDLTKRMEMVAKQYHVTTNTLLQTAWGLLLQKYNGSNDAVFGGVVSGRPADISGIENMVGLFINTIPVRIRSKAEDTFADLIRANQQQALASQDYETYPLYEIQALTEQKQELIQHIIVFENYPVEEQVEQLGEGAESDFVISNAGMIEQTNYDFNLVVMPQEAMKIRFEYNAKLYDREAVERTQGHLVQLLEQVVAQPDIQVQELDVLSEQEREQILHGWGDTAAEYPSEQTIHGLFEAQAVQTPEQPALYFEGEQLTYRELNERANRLARTLRSQGVTKDRLVGLMTERSVDMIVGIFGILKAGGAYVPIDPTYPEERIRYMLDDSGAELLLTQSHLVDKVAFDGQVLVLNGAESVHHEDGSNLESLSGPNDLAYVIYTSGTTGQPKGVMLEHRGLCNLKTYFDQEFQISASDHTLLFASYSFDAACWEIFQALFCGATLYMPTSETILDYERFEHYMTEHQITIATLPPTYAVYLEPERMPILRILITAGSAASTELVYKWKDHVAYYNGYGPTENSVATSIWPVSKDERAGQLISIGRPVPNHRVYMVDVHGHLAPTGVAGELCVSGPGLARGYLDRPELTAEKFVPNSFAAGEAGYERMYRTGDLARWMPDGNIEYLGRIDHQVKIRGYRIELGEVEAQILKVESIQEVIVLAQADEQGQNQLVAYFVAERDVSAGELRSLLGEELPNYMVPSYLVQLEQMPLTPNGKIDRKALPAPEGSLQSGADYVAPRTWVEVKLAQIWQDVLGLAQVGVKENFFEIGGHSLRATTLASKIHKELNKPLPLRSIFEAPTIEQLAVALEQLDQVTYASIPVTEERSFYPLSSAQKRLYVLHQFDPHDVNYNMPSVLQVSGPLDVKRVEHAFRQLIARHASLRTRFDLIDSEPMQWIEDKVPFEVEYTKLQAEGVTTDTDTMASKEVQELVSRFVRPFDLKAAPLLRVGLVDLGVQGVEQESQHLLMLDMHHIISDGVSMGVLTEEFVRLYDGGELPPLRIQYKDYAVWQQSEAHQEWMQRQEAYWLDTFRGELPVLDLPTDFARPAVRSTAGDTVVFGLEREVSERLKELAAHTGSTLYMVLLAAYTALLHQYSGQEDIVVGTPIAGRPHADLEPILGMFVGTLALRNYPTAEHTFRSYVEEVKVRALQAYEHQDYPFEELVEKLNVKRDMSRHPLFDTMFTLQTTEEGELQLADLSFRPYGLEQTPAKFDLTLEAREEEAGIQFGLQYATALYQRETVERMTRHFIRLAEAVAANPDAKLGELELITTEETERILKVFNDPNAHSVRGTLQGLSLSERFEEQAKNSPERIAVVSGDMALTYAELNEQVNRLARVLRAKGVEADQPVGVLLERSADLLVSILGVLKAGGAYVPMDTMYPQERIDYMLQDSGATVVITRRAANLSLSLPSTVQAIVLDDEDVQAQLGAQDANNLIPVAGLHNLAYMIYTSGTTGQPKGVMIEQGSVGNLVDALYERVYSRYDQPLHIAWLSAFVFDASVKQIFASLLLGHTLHVVSRDVSLSGEHLIAYYRTHRIDLSDGTPAHLHILNESVNVTEAPDVKHYLIGGEALSVQLVQGFLHKWSGYRPVITNVYGPTEATVDATAYTIEDVESLNVLLEKGEHTVSIGTPIANQAVYILNTRQQLVPIGIAGELYIGGAGIARGYLNLPELTAEKFVPNPFADATAADPADSSYANRMYRTGDLARWLPDGSIEYLGRIDHQVKIRGYRIELGEVEAQLLTVDGIQKAVVTAWENEDGHKDLCAYIVASESLSLPELRNALQPKLPDYMIPTYVVQLDRFPLTPNGKIDRKALPAPEARLEGGLEYVAPRTPLEAKLAQIWQDVLKLSSVGVTDSFFDVGGHSLRATTLVAKIHQELDSRITLREVFQHFTIEQQAQLIATHGTDTYTVIPAATKQSYYPVSSAQKRLYILSHLEGGDLSYNMPGVLTVEGPLQADRLEEAFRQLVARHETLRTSFEMVDGEVVQRIYDQVEFVVERLQASESEAEVYIESFVRSFDLRQAPLLRVRLIQTGPERHLLMYDMHHIISDGVSSNNIVQELGQLYEGQALKPLPIQYKDYAVWQQQEMQRESYQRREQFWLEHLAGELPVLDLPIAYPRPAVRSFEGAMYEFTVDPNVSEQLHQVAAQTGSTLYMVLMSAYTVLLSKYSGQDDLIIGTPVAGRLLPELEPLIGMFVNTLAIRHQPQGNSTFHNYLLEARDRTLQAFEHQDYPLEELVEKLDIVRDASRNPLFDTMFVLQNTESQEAKLETLSFSPYVQEHRISKFDLTLSMSDEDGQIKGSFEYCTKLFSADVIERLTGDLIAILSQVAANPDLQLSDIQVNFGEQAEGFSPDSIDFVF

SEQ ID NO: 411 - DNA, 42243 bp, Paenibacillus polymyxa
  source 1..42243: mol_type = genomic DNA
  misc_feature 1..42243: note = strain LU17007
atgactcagcacgatgttcaattgtttgcattaagccagccacagcaacgtatttggtacacggagcttgtgtatcccaatcgcaacacgtctacgattattactactgttaaaatcaagggaacggttcgcatagatgcattgcagcaggcaatgaaccgggttattgcacgaaatgattcttttcgtatcaaaatcacggtttgggacggcattccctatcaatatgttgagccgtttgctaatcaaagcatagaaacccttcaggtaacccaggaggaagctgagctatgggtgagtcatcataacgcacagccgttccccttactggattcgcagctgtatcggtttgttattttgcagctgggggcagaagatacctggtttagtttcaagatgcatcatattatttctgacggcgttaccatggagcaggccattaatgaaattacgggaaattatatgaatattgtgcatggtacaggttcagatgcgccggtcccagcgaactcatatctcgattttattcagacagagcaaagctatgagcaatcagaacgctatcaaaaggataagatgtactggacggagaaatttgccaatttgccggaggttacaggtttaaaatcgtacaatccgctcacagtaagcacggctgcacgccgggagacctatacactggaacatgaattatattgtggtgtcacggctttttgcgaggcgcataacatcagtatttttacattttttctggctgctctgtatatttatttacataaaacgacaggtgaacaagatttaacggttggtacattgtatgctaaccgtacgttgaagaaggaaaaaaatacaatgggcatgttcgtcagcactgtggctacacgtttgcaagttgagccggaatccgagctgcttactttcctacagggtgttggcaaggagcagtcgtccattttgcggcatcagcgttatccgtataacaaaatcatacaggatttgcgtgaacaacaaagcggcacggatattggccgcctgtttggcgttaccattcagtaccgtacgctgagcttctctcgttttgatgaagctgttcagcaggtgcataccgatttctgcggagatacggtgagtgactttgatattgccatgattgacatgctggatgacgataaacttgtattgcaactggattatcggaccgagctgttcagcgagcaggaaatcgcccgaatgattcaccaatttttgagtgtggtagagcatatggtgaaagggccacagcagcggattcaggagttgtcactgatgagtgacaaagagcgggcacaaattatgaatgtatttaatgcgaccacagttccctttccagacgatgtggggattcatgagctattcaagaaacaggcagaatgtacaccagatcagacagcggttatgtttggaagtcagagtctgacttatcgggaactgaatgaacggtcgaattcattggcacgaatgcttcaagcacagggagtaggacctgacaagctggtcggcctgatgatgcagcgctcagtggaaatgatcgtaggcctgctggctgttctaaaagcaggcggtgcttatgtgccgattgatcccgaatttccgtcatctcgtattgaatacatgctggaagacagcaaggctgcagtgcttctgaccagtcgtgatttggcagaagagcaccattgtcaggccaataccatgtttcttgaggatgcagaattgtatcagggagacagctgcaacctggaggtgatttctcacccagagcatttggcttacgtcatctatacctctggatcgactggtaatccgaaaggagttatgctccagcatcgttcggtactcaactttattaccgggatgcgtgaaatcattgactttgaagctggtaaaaccattttgtcactcacgaccatttcattcgatattttcgtcttggaaactatcttaccgctattggctggaatgacggttgtgcttggcgatcaccagcatcaattggatcctcaggcgcttggtgagttgattacccatcattctattgagatgttgcaaatgacaccatcccggctgcagatgctgctggatcatgaagctggttcccgcgcgctgcggggcgtaaaggaaatcatggtgggaggtgaagcccttccttccaagctgctcgcagcactgcaagaaataaatggcccccgtatttataacatgtatggacctacagaaacgacggtttggtcgaccgtacaggaactgactcatgctcaagaaattaatataggacgtcccatcgcgaatacccaaatatatatcatcaatgcgaatggggaattgcagccagtcggtgtgccgggcgagttatgtatagcaggggaaggcttggcccgtgggtattggaatctggaagatctgacggcagagaaatttgtaaataatccgtttgccggagataaagcaggttatgaacggatgtaccgtacaggcgatttggcgagatggacactggacggcaacattgaatatttgggacggatggatcaccaggtgaaaatccggggctaccggatcgaactgggcgagatcgaatcgcagctattgcaggtggagtcggtacgagaagcggccgtcgtggctcgtgtggacgaaacaacgggccaaaaacaaatggtggcatactatgtggccagtcaagcaatggaagccagtaaactgagaagtgagctggggcgggagctaccaagctatatggtgccgtcgtatttcattcagttggagcagatgccgttgacaccgaacggtaaaatcgaccgcaagtccctgccagcaccggaaggcagtcagcaaagcggagcggattatgaagcgccccatactgcgcgggaacaggcactcgcaacgatctggcagtccgtcctgggcgtgccaactgtaggtattttggacaatttctttgatctgggcggcgattccatcaaggcgattcaaatcgtatcccgtgcgttccaggcaggctacaagctggatatgaaggatctgcttcggtgtccaaccatcgcagcattggcaccgcttatgacaagtcgtatggcagatcagggagaagtgagcggggaaacggcattgcttccgatccatcattggttctttgaacaggagcaagtggacgcgcatcactttaatcggctggttatgctgcaccgggagcagggctttgacgaagctgctttgcatcaagcgctaatccagttgacggagcaccacgatgcactgcggatggtgttcaggaagaccgagcaaggctaccaagcgtggaatcgcggaatacaggaaggcgagctgtatcatctggacgtgctggactttagggatttgacggatgaagtcatcctaagcacgaagattgaaacgaaagcaactgaaattcaaaacaacataaacttgtctgaaggaccgctggtaaagctcgctctgttccgttgtactgatggagaccatttgctggtggcgatccaccatttggtggtcgacggcgtatcatggcgtattttgctggaggatctggcatccggctatgagcaggctttacgggacgagtctgtccgcttgcccaataagacggattccttccgcctgtgggcagatcaactggcagcttatgcgaacagcaccgcgttggagaaggaacgtgcgtattgggagcaggtggagcgagctggtgctgctcaagaggcattgcctaaggattacactcgtaaatctcaggccaagccacagcttcgtgatgatcgaacactgaccgtagcgtggacggtcgaagaaacggaacaattcttgaaacaagctcatcgggcctacaatacagaagcaaacgacctgctgctgacagctctgggcatcgccattcaggagtgggcaggcatccgtcaggtgcttgtaaacttggagggtcacggacgggaagccattttgccggatatggatattacgcgcacggtcggttggtttaccagccaattcccagttgtactggatatgggcgaagaccggaatgtgggacagcgtgtcaagaacgtcaaggaagggctgcgccgtttgccgcataaagggattggatacgggattttgagatatcttgctgacagagaagggaaagcagcttttgttgccgagccggaaatcagttttaactatctcggacaattcgatcaggatttgaaaaataatgcattccgcatgtctccttattccatcggggcctccatgagtgacacattgaccaagcggtatgcgctggatatcaacggcatgatcacagacggcgcactggaactgacgatcagctacagcaacaaaatgttcatgaaaaaatcaatcaaaaagctggctgatttacttcaggagagtttacgtgaggtattggctcactgtgtggtcaaagagttgccggagctgaccccaagcgacttgtccttccaaggactaacggccggagagctggatcatattgtagagcagacggctgctgcgggggaactggaaaacatttattcgttaacacccatgcaaaaaggcattctgttccacggcttaatggagccgcaatccggggcgtattttgagcaggcgacatttgatctacaaggcagctttcaagtggaggcttttgccgaaagcctcaatcaactggtggatcgccatcaaatattcagaacgaatttttatagcggctggaatgaacagcctttacaggtagtgtaccgccacaaacctgccgggttccgttttgaagatatacgcttgatgggacaagaagagcaggacgcatacattgctgattttgctgagcgcgacaaagccgaaggctttcatttcagctcaggcgagctgatgcgggtgtctattttacgtacaggcgaggagtcgtaccgctttgtgtggagcttccatcatattttgatggacggttggtgcttgttcctggttgtaggggaagcatttaatacgtactttgccatcctcgaagaccgcaagccggagcttgtcccggtaacaccatacagcgaatatattgaatggctggatcggcaggacaagacggaggctgaacggttctggcgcgattattttgcgggctttgagcagcagacggtattgccgcaggtcaaacagctggacggtcacgctaaagcatatgaagcggacaagctttcgtttacactgggccgtgaagtgacggagcggatgaacaagctggttaagcagaagcaagtgacggtcaacacacttttgcaagcagcgtggggcgttgtgctacagcggtataacaacagccgggatgtggtatttggcagtgtcgtatctggtagatcagcagatattccgggcatagacaaaatgattgggttgttcattaatacggttcctgtacggattcacagtgagaaagatatgacatttgctgggctgatgaagcagatccaggagcaggcactggcttcccgtgcctacgaaacctatccgttgtatgacattcaggccctgaccgagcagaaacaggacttggtaaaccatattatcgtgtttgaaaactacccggtagaacagcgcatggagcagatgggtagccgtggcgcgaatggctttacgattgccaatgcttccatgtcagagcaaacgaactatgatttcaacattaccgttgtgccgggtgatgaaattcatttccatttggagtacaacgcgcgagtgttggaacgtgcagctgtagagcaaatccgtgagcatttgctgcatatgattgaagaagcgattcacagaccagatgcacgggtagatgagcttgaattggtgactgctgcggaaaaagcaaaaatcatcgacggttttggatccgtgggcgtatctgcatggagtgatgaaaagcaatcagaagggttgtttcacgcctatgtggaagaacaagcgcagcttgtgccggatcatgtggcagtggtatacgaggaacggcagtttacgtaccgcgagctgaacgagcgtggaaaccagcttgctcgcagattgcggaatgagggcattggacgggagtccattgtcggtattttgagtgaacgctcggtggacatgctggtcggcgtattggcggtctggaaagcaggaggcgcatatgtaccgctggatgcggattatccgtccgatcggattcgctttatgctggaggacagtggtgcgacggtgctgctaacgcaaaccggtttgcaagagcgtgcacagggttggctggaggcaagtcggcaggccttggtcggagggcagactgagggtgaattggaaacagcggctggcgctgaaacgatggaaagagacagcctgagtgaaggcgtaagcttgaaatcagattcgaagtctgacaacgaagaagcatccgaaccggcaacaggactgcgtctgcgtactgtattggcattggacgatcagtcgctgtacaccggggatgtcacggatatcgaaccgatcaatgaaccgcacgatttggcatatgtgatatacacgtctgggacaaccggacgtccgaagggcgtcatgatcgaacatcgcagcctggtaaatacggctgcggcgtatcgccgggattaccgtctgaaccagttcccagtacgactgctgcaactggccagcttctctttcgacgtgttcgtcggggatatggcacggacgctctataacgggggcacgatggtcatttgtccgaaagatgaccgcattgatccaagccgtctgtacggctggattcgtgattaccagattaccgtgttcgaatcgactccggccctgatcgtaccgtttatgcagcatgtgcatgaacagggccttgacatgagcagcatggaactgctgatcaccagctcggatagttgcagcgtgacggactaccgggtgctgcaagaacggtttggcgcagatatccgcatcatgaacagctacggcgtcaccgaagcggcgattgactccagcttctacgacgaagagctgtcgaagctgccaagcagcggccatgtgccgattggtcaggcatggctgaacgcccgcttctacattgtggacagccagctgaatccggtgccgatcggcgtactgggtgagctgtgcattggcggtgctggcgtggcacgggggtacctgaatcgtgcggacctgaccgctgagaaattcgtagcgaacccgtacgtaccgggggaacgtttgtatcgcacaggcgatttggcgcggtggatgccggacggtaatgtggactttattggccggatggactatcaggtcaaaattcggggctaccggatcgagctgggcgagattgaaacggcgatccagcgagtgccaggtgtgcgtcaagccgtagtcatcgaccggacggacgagcgtggaaacaaatatttgtgcggatacatcacgggagaagccgagctgcggattgaggaggtacaggcagcgctggaagccggtttgccagcgcacatggtgcctgcgcgcctgatgcgactggagatcatcccgctgaccagcaacggcaaaatcgaccgcaaggctttgccggagccagaaggcagcatccatacgggagcagcctatgtagccccgcgtaccacagtggagcaagtactggctgcggtatgggctggagtactgggcgtggaagccgtaggcacgcaggataacttctttgagctgggtggcgattcgatcaaagcactgcaagtatcgtctcgcttgctgcaagcaggctatcgattgaacatgaaagacctctttagtaatccgacagtagcagcactcagtcctttgcttcgtacagatggcaagatggccagtcaggaagaggcagtaggcccggtggaactgacacctattcagcgatggttcttcgagcagcagccggccgacctgcaccacagcaaccaggcgatgatgctgtatcgagctgggcgctttgacgtcgacgcgttgcgccgtacgatggaccgtatggtccagcatcatgacgcattgcgcacggtattccgtgagacggagcagggctatgtcgcttggaaccgcagtgtagcggaaggcgagctatacacgctggacattgtagatttcagcgcagtggaagacgaatccaccgctgtcgaagccaaggcgagtgaaatccaagccagcattcatttgagcgagggtccgcttgtgaagcttggtctgttccactgcgctgagggcgaccatttattaatcgtcattcatcatttggttgtagacggcgtatcgtggcgtattttgctggaggatttggcatccggttatgagcaggctgttgcaggtcaaaccggcacagcgatccgactgccgcataaaacagattcattccaggtatgggccaaacagctgtcagcctatgccagcagtgcgacgatggagcgggagcttgcttactggcaacatatcgaacaagcagaagctagccttgcgaagcctttgccgaaggattttgcaaatgacaatgctctgcttggagacagtgaggttgtgacggtccgctggacgaagcaggaaaccgagcagctgctcaaacaagctcatcgcgcgtacaacacggaaatgaatgacctgttgctggctgcgctcggaaaagcagtctatgactggtctggttccgaacgggtgctggtcaatctggagggccatggacgggaagccattgtaccggatgtggatattacgcgcacggtcggctggtttacgagccagttcccggttgtactggatggaagtttgggacaagggggacataccgctcgtctgatcaaaaagatcaaggaagggctgcgtcatattccgcaaaaaggcatcggctacggtattttacgatacctgtcagatatgaatatgctggagaaagcaggcgtgcggttacaggctcagcctgagatcagttttaactatttgggccaattcgatcaggattataaaggcaatgatctacagccttccgcctattctatcggtgtgcctgtcagcacgaacgcgactatggattttgcgctggatatcaatggagtgatcgaagatggcgagttgatgttcacgattcgctacggcacaacacagttccgtcatgaaacgattgaacggcttggagagctgctggcatccagcttgcgtgaggtgattcatcactgtgttgcccaagaaagaacgatgctaaccccaagtgatgtcctgttgaaccatgtaacgctggatgagctggagcaattggtggaagatacgcgagatctgggcgagctggaaaatgtgtatgccttgacgccgatgcaaaaggggatgctcttttacagcttgatggatgagaattcagcggcttattttgagcaggccacctttgagttgaacgggcgttttgatgtggtcactttcggtaaaagttttgatttgctcgtacagcgtcatgaggcattgcggacgaactttatcagttcatggaaggacgagcctgtacaggtcgttttccgcaatcgtagcggacaattatactatgaagacctgcgcggactggaaaaagaggaacgaaaagctcaagttgaagcttttacccttgccgataaagcaaaaggattcaatctcgcagagggcgcactcattcgtatctccatcctgcaaaccggggatgaaacgtatcactttatctggagcttccatcacattttgatggatggctggtgcttgtcctttatgacacaggaggtattcggtagctatctggcactgcgtgcgggatgggagccagtactggagccagtcacgccgttcagtcgatttattgaatggctggaacgtcaggaccgtgaggcagccttgcaatactggagtgggtatttggcggactatgagcagcaaattacgcttcctcagcaaaaaacacagcctaaatcgatgcacgtcggggaatatatcgctgaagatctggattgcgaattccagccagagctggttgcccagattgaacgggtggcgaagcaaaatcaggtcacgatcaatacgctgattcagacggtatggggcgttctgttgcaaaaatataacaacagtacggatgtcgtgttcggtagcgtcgtgtccggtcgtccaggggatattccaggcgtggagcacatgatcgggctgttcattaataccattccagtgcgtgtgcagtctgaacaaggcgaaacctttgtcgagctgatgaaacgaacccagcagcaggcgctggcttccaatgcctacgatgcgttcccgctgtatgaaattcaggcgctggccgagcagaaacaggatttaatcaatcatattatgatatttgaaaattatccggtggagcaacaggtagagcagttgggcagtgaaggacaggagcccttcacaatttcgaatgtggtgtctacagaggaaaccaactacgagctgaacgtcgtcgttatgccgggagaaggcattaaaattcgttttatgtataacacgctcagctttgatcaagcaggtattgagcgtctatatgggcatttcgcacgtctgctggagcaaatttcgctcaacccgcatgttcgggttgaagagctggaactactcacagcagcggaaaaacaacagattacagcggcatttaatgacaccgcttgtgcattcccatgcaaacagacgatccatcagctgttcgaggagcaggtagaatatacgccagaccaggtggcattggtgtttggacatcagagtctgacttatcgggaactgaatgaacgggccaactcattggcacgcatacttcaagcacagggagtaggacctgacaaactggtcggcctgatggtgcatcgctcagtagaagtgatcgtaggtctgctggccgttctaaaagcaggtggtgcttatgtgccaattgatcccgaatttccgtcctctcgtattgcatacatgctggaagatagcgaggccacagtgcttctgaccaatcgtgatctgttggaagagcatcattgccacgccaatgcaatatttcttgaagataaagaattgtatcagggagagaacggcaacctggagacagttgctcagccagagcatttggcatacgtcatctatacgtctggttcgactggaaatccgaaaggagttatgctccagcatcgctcggtcctcaattttattacagggatgcgcgaagtcattgactttgaagccagccaaaccattttgtcactgacgaccatttcattcgatatttttgtcttggaaaccatcttgcctctgctgggtggaatgacggtcgtgcttggcgacagccagcatcaggtgaatcctcaggcactaggtgaattgattgctcatcatcatattgagatgttgcaaatgacaccatcccgggtgcaaatgctgctgggtcatgaagcaggctcccgcgcgctgcaaggcgtgaaggcaattatggtcgggggcgaagcccttccgtccaagctgctcgcaacactgcaagaaataaacggtccccgtatttacaatatgtacggacctacagaaacgacagtttggtcgactgtgcaggaactgacccatgctcaacaaattaacattggacgccctatcgcgaatacccaaatatttatcatgaatgcgaatggggagttgcagccagtcggtgtgccgggtgagttatgtattgccggggaaggattggcccgtgggtattggaaacgtgaagaactgacggccgagaaatttgtaaataatccgtttgctggtgacaaggcagaccatgagcggatgtatcgtacaggcgatttggcaagatggatgccggatggcaacattgaatatttgggtcggatggaccatcaagtgaaaatcagaggctaccggatcgaactgggcgagatcgaatcgcagctgctgcagatggagtccgtacaagaagcggtcatcatggcccgcacggacgaaacgggtcaaacccagctagtggcgtactacgtggcgagtcaagagcttggagctaatgagctgaggcaggagctgggacaagagctgccaagctatatggtgccgtcgtatttcatctggttggagcagatgccgctgacaccgaacggtaaaatcgaccgcaaggcactgcctgcaccggaaggcagtctgcacagcggtgcggattatgcagtgccacgcactgtaacggaacgagcactcgtagcgatctggcagtccgtcctgggcgtgccaactgtaggtactttggacaatttctttgacctgggcggcgattccatcaaggcgattcaaatcgtgtcgcgtgcgttccaggtaggctacaagctggacatgaaagatttgttccgctatccaaccgttgcaacactggcaccgcatatgcatgagacaagtcgtatgatagatcagggagaagtaactggagaaacgactttgcttccgatccagcacgggttctttgcacaggagcaagtagacgtgcatcactttaatcaggcggttatgctgcaccgggagcagggttttgatgagtctgctctgcgtcaggcacttggcaaactagcagcgcaccatgatgcactgcggatggtgttcagcaagaccgagcaaggctaccaagcatggaaccgcggaatacaggaaggcgagctgtaccatctggatgtgctggactttagcaatttgacggatgaagtcatgctcaacacggcaattgagacgaaagccagtgaaattcaaagcagtattcaactgcaagaagggccgctgttaaaggctggcttgttccactgtgcagacggggatcatctcctgatggcaattcaccatttggtcgtggacgggttatcatggcgtattttgttcgaggatttggctgtagcttatgaacaggccatccgtgaagaggcgctccagttaccagacaaaacggattcattccgtttctggtcacaaaaactttccacctatgcgaatagcgcgaccatggaaagtgaacacacctactgggaacaatggaacgcagccgctttgttagaccaagtacgtttgcctgaggatcaagggcaggctgagccatttaccctagctgacacggatacagtggacttccagcttacggaagaagagacagaaaaactattgaagcaagcacaccgcgcatataacacggaagtgaacgatctgctgctgaccgcattgggcatgacgctgtacacgtggacgggtcatgaacgcagtctgattcatttagagggacacggacgtgagaacattttgccggatacggacctttctcgtacagtaggctggtttacgagtcaatatccggtatggcttgacatcggccgtgatcacgctttgtcggaatgcatcaaacaggtcaaagagagtctgcgtcatattcctaataaaggaattggctatggaatttggagatatctgaatgaatctggtcaagccgttggtcaacatcaagcttttgccgagccacaagtaagctttaactatctcggacagtttgatcaggacttgcaaaacagcgatatccgtatgtctccttactcgatgggatcggtcattagtgaccgtacgaagatgaaatatacgctcgaagtgagcggaatcgtaacgaacggcatcctggaactggagattcggtataacggaaaagccttccgtaaggacaccgtgcagatgctggctgatctgttgaaatccaatctgcttgaaatgatcgagcattgtgtcacacgggagcggaccgaattgactccaagtgatgtactgtttaaaggtctgaccctggagcaattagatacgattaaggagcagacaaagacgcttggggaattggaaaatgtgtacccgctaacgccaatgcaaaagggtatgctgttccacagtttgatgaatgcagaaacaggcgtgtattttgagcaggcgacctttgatcttgagggctactttacaccgtctatattcgaggaaagcttgaagctgctggttagtcgacatgctatattacggacgaatttctatagtggctggcatggtcaaccgttgcagattgtctatcgtcataaaaatccgagcttcttttatgaggatgtcagagggtgtgaacaggctgtagctgaatttgtggcccaggacaaagctcgaggctttgatttaagcaaggatgcgctcatgcgcgtagctgtcttccgcacgggtgatcgctcataccgttttgtatggagcttccatcatattgtgatggacggctggtgcctgtccctgatgacggacgaagtgtttggtgcatatgttgccttgctggagaataagcagccagagctcgcacctgtcaagccgtatagtgactatatcgaatggttggaacatcaagatgcacgggaagcgacccgttattggagtaactatttggcaggttttgggcagcaaacattgttgcctagtgagaacgtgcaagcttctgtagtagaacgcgatgaagatacagacagaagcggtggaagttcaaattccggttatgtttcggaaaagctgccatttatgttgggtaaagaacggagtgccacattaaaccgaattgccaagcaacaacatgtaacgattaacacattgctgcagagcgtttggggcgttattttacagaaatacaataataatcaggatgttgtgtttggtagtgttgtatccggtcgtccggcagaaattgcaggcgtagagaacatgatcggtttgtttatcaacacgattccggtacggatatgcagtgcaccagatgctacatttgctgaagtattgcagcgtacacaggaacaggctttggcctccagtgtctatgatacgttcccgctgtacgacattcaggcactgactgaacaaaaacaagacctaattcatcacatcatggtctttgaaaactacccaatcgggcagcagatgaagcagatgggcggttccggcgagacaaaggcacaaacaggcttctctattgccaatgtggcacttgcagagcaaaccaactacgattttaatctgattgtcgtacctgatgaggatatctctatcctgtttgaatacaatgcgctggtgtataaccggtctgcagtggagcgtatctatggtcatatcaaccatgtcatcggacaaatcgtggacaatccgcatatccatgtgaatgagctggaattggtgacaccggaagagcagacacagatcgttcaggtgtggggagatacggcggcagcctattcgcaggatcaaacgctaagcgcattattcgagcagcaggcagcgaacacgccggagcaagtggcggtgttgtgcggagcggaatcgttgacctacgcagagctgaatgagcgagccaaccgtctcgcacgcaccttgcgtgccgaaggggttgaaccggatcagccggtaggcattctggtccaccgttcactggacatgatcgtaggcatctatgcgatcctgaaggcaggcggagcctatgtgccgattgatccggaatatccggccgaccgcatccgctttatgctggaggactcaggcgcgaagctggtgctgacgcaatcgcatctggcggagcaagcatcgctgagtttcgacggccaggtgctgatactggatcacgaggacatctatcacgaagatggctcgaatctggagccactggctggatcgcaccatgtcgcctatgtcatttatacctctggctccacgggaaaaccgaagggcgtgatggtggaacactattccgtgctgaaccggattttgtggatgcatgatcggtacggcttgagtgcggaagatacgatcctgcaaaagaccgccttcaccttcgacgtgtcggtgtgggagctgttctggtggtcgatggtcggctcgaaggtaagcctgctgtccgtgggcggggaaaagaacccggaagatatcgtcgaaacgattgcccgcgatggcgtgagcacgatgcactttgttccagccatgctgcatgcgttcctggagtacgttgagcagcagccacgggaagtgatgcaagcgaagctgggcacactgcgccatgtctttgccagtggtgaagcgttgccgccacagcatgtggccaggttccagcggctcgtatcgagcctgaccggagcgaagctgatcaacctgtacggcccaaccgaagcgacggtggacgtatcgtactttgattgcgagccggatgaggaatatacagttatcccgatcgggaaaccgattcaaaatatccgtctgtatatcgtgaaggaaggcacggagcaattgcagccgattggtgtggcaggggaactgtgcatcggcggtgtcggcgtagccagaggttacctgaaccgtccggagctgacggccgagaaatttgtagagaacccgtttgccggaggcaaagcaggctatgaacggatgtaccgcaccggcgatttggcgagatggatgccggacggcaacattgaatatctgggccggatcgatcatcaggtgaaaatcaggggttatcggattgagctgggcgaggtcgaatcgcagctgctccaggtggaatcggtacgcgaagcggtcgtcgtggcccgtatggacgaaatgggccaaaaccacatggtggcctactatgtcgcgggacaagaagtcgaggccagcaagctaagaagtgagctgggacgggagttgccaggctacatggtgccatcctactttgtacaactggaacagctgccactgacaccgaatggcaaaatcgaccgcaaggccttgcctgcaccagagggcagcctgcaaaccggagtcgattatgccgagccgcgtacggcgcaagaacgcgctttggtagccgtctgggagtcggtactggggttgcagacggtcggtattctggacaatttcttcgatctgggcggtgattcgatcaaggcgatccaaatcgcctcccgtgcgttccaggccggctataagctggacatgaaggatttgttccagtatccaaccgttgaagccctggcaccgcatatgcaagaggtccgtcgtatggcagatcaggaagaagtcagcggggaaacggcgctacttccgatccagcattggttctttgcgcaggagcgcgagcgtccacagcactttaatcaagcggtcatgctctatcgcgcggagggctttgaggagatggcaattcgccaagccatggatcacctcgtgaagcatcatgatgcgctgcgtacggtattccatcagacttccgctggttatacagcttggactcgccatgtagaggaaggcacgttatatacactggaaatggtagattaccgtgaacgggccgcttatgcggaagcgctggaagcgaaggcaacggaaatccaaagcagcatggacctgtccgcaggacctttggtgaaactcggatggttccgcacagcggagggcgaccatctgctgatcgccattcaccacttggtggtggacggggtgtcgtggcggattctgtttgaagatttctcgacaggctacgagcaggcgatccagggcgagtccgtacgattgccctataaaacagattccttccaaaaatgggcacgggagttgtcctcttatgctaaccgtcctgaggctgcatcggatgaagtctattggaagcagctggaacaggtcaaagctgaagctgcaccactgcctaaggattttgcctacgagggctccgtgaatgcagacagcgaagtgctaacggtggagtggactgaagctgaaacccagcaactgctgaagcaggcccatcgcccctataacaccgaggtcaatgatttgctgctgaccgcgctgggactcgcggtgcacaactggacaggtgcaggacatgtactggtgaacctggagggccatggtcgggaagcgatcttgccagaggtggatattacacgtacagtaggctggtttacgagcttgtatccagtgctgctggagaccggcaaagaaatgacactggcagagcggattaaagaaacgaaggaaggcctgcggcgtattccgcataaagggcttacctatggcacttggcgttacctgtcctctgcgttgcctgcagatgaagtgggcacgatcgcagcagaaccggaaatcagctttaactatttggggcaggtcgatcaagatctgcaaaacagtggaattacgttgtcctcctaccgtgcaggggaaacagaggatgcccattcaccgttactgtacacgctggatttgaacgcgatgatctcagaaggcaagctgcgcttgacgatcgcttacagccgtaagcagtatcgtaaagaaacgctggaacaggtggcggggctgctgcaatccgctttgcaggaggtcattacgcattgcgtcgctcaaaagcagcctcagctgacgccaagtgatgtatccttcaaaggtctgacgactggagagctggaacagatcgcggaacaggcagcacgtatcggtgagctggaaaatgtatacgcactgacgccgatgcagaagggcatgctcttttacaatctgatggattcgcaatcgggagcttattttgaacaggcctcctttgatctgcgaggacattttaatatcgctgcctttgcagccagtttggatgtcttggtgcagcggcatacggtactgcgcacgaacttctacagcggctggaaggatgaaccgcttcaggtcgtgtaccggaataagcgcagcgaactgtatgttgaagatttaagggacatggaggacgagcagcaaaacgagtacatcctcgaatttacgcgccaagacaagcaaagaggctttgatctggcgcaggatgttttgatgcgtgtggctgttttgcgcacaggtgaggaatcgtaccgttttgtatggagcttccatcatatcgtgatggacggctggtgcttgtcgctggtgaccaacgaagtgtttgcgagttattttgcgatactggctcataaacaacctgaactggcccctgtaacgccgtacagtcaatatatcgaatggctggaacagcaggatcgtcaggccgcatcaagctactggagcaaggttctggaaggatatgaggagcagtcccgtttgccacaggcaaaaattcagggtaagacggggtatcaggcggagcgtttggattttgatttgggcgcagacctcacagctggtattcagcgcatagccaagcgttatcaggtcaccatcaatacgttgatgcaaaccgtttggggccttttgctgcaaaaatataatggcaccgatgatgtcgtgtttggcagtgtagtatctggacgtccggcagacattccgaatgtggagcatatcattggtctgtttatcaatacgattccggtgcgtatccgcagtcaggtggacagcgtattctccgacgtgatgaagcacatccaggagcaatcgattgcttcccatgtgtatgatacgtatccgttgtatgaaattcaggggctgtcggagcttaagcaggatttgatcaaccatattcttatttttgaaaattatccggtagaggaacaaatcgagcaattaggtagtagtgaggcgtccagcttcacgatcacaggagccgagtctgtcgagcagaccaactatgactttaacgtggtagtgctgccggggaataccattcacatgagctttggctataatgccctagcctttgaacgggaaagtgtggagcaaattcgaggtcatctggtgcagctactggagcaggtgacagcgaatccgaacattcgcgtacatgaactggacatggttacgatgcaggagcgtaagcaaatcgttgaggtgtggggcaatacagcggcagcctatgcaagcgagcaaacgattcacggcttgttcgaggcgcaaaccgcgcagacgccagagcagacagccttgttctttgaaggagagcagctgacttatcgcgagctgaatgaacgcgccaatcgattagcgcgtaccttgcgcagtcaaggcgtgacgaaagatcgtttggtgggtctgatgaccgagcggtcggtggacatgcttgtgggcatcttcgggattttaaaagccggaggcgcctatgttcctatcgatccaacctatccggaggaacgtatccgctatatgctggatgactcgggagcgaagctgctattgacacaaagtcatctggtggacaaagccgttatcgacggtcaagtgctggtattggatggggaacaatcggtgtaccacgaggatggttccaacctggagccgctgtctggtccaaacgatttggcgtatgtgatctacacgtcaggtacaaccgggcagccgaagggcgtgatgctggagcaccacgggctgtgcaatctgaaaacgtattttgatcagacgctcaagattcgtgcgtcggatcatgcgctgctatttgccagctactcgtttgatgcggcttgctgggaaatcttccaggcgctgttctgcggggctacgttatacgtgccaacaacagagacgattttgaactacgaacggtttgagcaatatatggcggatcaccacattacggtggctgctttgccgccaacttatgcagtgtatttggagccggggcggatgccgcacctgcgtattctgttcactgcgggttcagcctcatccaccgaactggtatacaagtggaaggatcaggtggcgtactacaatggctatggtccaaccgaaaactcggtggcaacatccatctggccggtatccgaggatgaaagggcaggacaactcatttccatcggacgtcctgtgccgaatcaccgggtatacatggtggatgtccatggacatttggcgccggtcggcgtagcaggtgagctgtgcgtgtccggtccgggtctggcgcgtggttatctggatcgcccagagctgacggcggagaaattcgtagcgaacccgtttgcggcgggtgaagcaggctatgaacgaatgtaccgtacgggggacttggcgagatggatgcctgatggcaacattgaatatttgggccggatcgaccatcaggtgaaaatccggggctaccggatcgaactcggcgaagtcgaggcacaaatgttgaaagtggaaaacgtgcaagaagtcatcgtcctggctcaagcggatgagcagggacaaaaccaactggtggcgtactatgtcgctgaaagagacgtaagcgctggggagctgcgcggcttcctgggtgaggagctgccaaactacatggtgccttcgtatttcatccagctggagcagatgccgctgacaccgaacggcaaaatcgaccgtaaggccctgccggcaccggaaggcagtctgcaaagcggagcggattatgtagagccgcgcacagcgctggagcagacgttggcttcgatttggcagtctgtattaggaacgaagaacatcggtattttggataatttctttgatctgggcggcgattcgatcaaagcaatccaggtatcctcccgcttgctgcaagcgggctacaagctggacatgaaggatttgttccaatatccgtccatttcgctgctgagtggtcatgtacacccagtcagccgtacggccgatcagggcgaggtttcgggcagcgtcaagctgaccccgatccagcagtggttctttggactatcgtcggcagagccgcactattttaaccagtcggtaatgctgcatcgagcagaaggctttgatatagatgcattgcatcgcacggtgacccaggtgacggagcatcatgatgcgctgcgtatggtcttccgtcagaccgaacagggctatgaggcgtggaatcgcggtgtgaacgaaggcgagctgtatcatctggacgttgtagatttgacaggcgtcgaagatacggcagatgtgatgatggcgattgagatgaaagccaatgccatccaaagctccattcatctggatgaaggaccgctggtgaagctgggacttttccgctgcatggatggagatcatttactgattgccattcaccatttggttatagacgggatctcatggcggattgtgtttgaagattttgcgactggatatgagcaggccgttcggggagaagcgattcgcttgccttataaaacggattcgttctctgcttgggcagagcggttgtctcaatatgcgaatagtccagccattgacaacgaacgcgaatactggcagcgtcttgcccacatagaagttgcatcgctacctaaggatcaagacaaagcagcaggacagcctttttgggtcagagatagtgagacggtgaccgtggcttggaacgaacaggaaacccggttgctgcttcaggaatcacatcgtgcgtacaatacggaggtcaatgatctgctgttaaccgcactcggcagcgcattgtacaactggagcggtcaggagcgtgtgctggtcaatctggagggacatggccgggaagctattgttccagatatggatattacacgtaccgtgggctggtttacgagtcagtatccggtgctgctggatgtcgatggaaaggcagagattgggcagcgcatcaagcgggtcaaagaggacctgcgtcatgtgccgcataagggcattggctacggtattttgaagtatatgtcttcggatgatgctacctcttcctggagcctgcagccagagatcagctttaactatttgggacaatttgatcaggatttggaacaaagcgatatcgtgctgtcttcgcatacggacggagagccgatgagtggttataccgtgctggagcagccgctgaatgtgaacggcatgattacagcaggcgtgctgacactggaaattcgctatgacagacaagtatatcatcagcaaaacgtagaaaaatttgcgcagttgctacgggaaagcttgcaggaagtaatcaagcattgtgcctcccaagagcggagcgaactaacgccaagcgatgtcttgttcaaaggcttgtcgttggaacaactggagcaattgacggagcaaacggcttctgtgggcgaactggaaaatgtgtatgctctttctcccatgcagaaagggatgctgttccatagcttgatggagccagactcaggcgcatacttccagcaagcatcgtttgatcaaaaaggcagcttcgatgttgctgttttccgcaagagcctagatctgctgacacagcgtcatgaagcgctgcggacgaatttctatcggtttgagaccggacatggtcaggagccattgcagattgtattccgtcacaaagatagtgacctttcctacaaggatgtacgcggaatgcagaaagcagaacaacaggcgtatatccaggcgttgaagcaggaggatcaggctcggggctttgatctcggtacggatgcactgatgcgcgtacaggtagtgcagaccgatgaagaaacgtatcactgggtctggagcttccatcacattatcatggacggctggtgcttatcgctcgttaccggggaagtgtttggtacgtactttgcgctgctggagcagaaacagccggagcttgctccaatcacaccgtatggtcaatatattgaatggctggagcgtcaggatgaacgtgcggcaaaagagtattggagcaactatttggcaggctttgaacagcagacgttgctgcctggatcggatactgcatcgaaagatcaagtggcagacagcagagataacactgtatccactacagcaagtacaaccagcgaatatgtttgcgaaaaaataacggtggagctggatccaacatggagcgaagccatgtaccggattgccaagcagcagcaggtcacgattaatacactgatgcagagcgtgtggggcctgattttgcagcaatataacaacaatgaggatgttgtattcggcagtgtcgtatctggacgtccgacggatattgcgggtgtagaaaatatgatcggtttgttcattaataccatcccggttcggattcaaagtgaacggaatgccacgtttgtcgacatcatgcggaacacgcaggagaaagcgctggcttcgggggtatatgacagcttcccgctgtatgaaattcaggcgctgaccgagcagaagcagcatctgattaatcacattatggtatttgagaactatccggtcgaggagcaagtcgagcagttgggcgaagttcgtccatccgcgtttgacattacgaatgtagaggttgttgagcagacgaactatgatctggacttgattgtgatgccggatgaaaccttccgtatcatgttcagatacaacgcaaatgtgtacgaccggtctacgatcgagcggatgcagggacatgtactgcatgtcattgagcaaatcgtgaacaatccgcatatccgtgtgaatgagctggaattggtgacaccagaagaacaggcacagatcgttcagatatggggagatacagcggcagcctatccgcaggatcagacgctaagcagtctgtttgagcagcaggtcgcgaacacgccggagcaagtggcagtgctgtgcggagcagaatcgttaacctacgctgagctgaacgagcgagccaatcgtttggcccggacgctacgtgcggaaggggtggaacccgatcagccggtgggcattctgcttcaccgttcgctggacatgatcgtaggtatctacgcgatcctcaaggcaggcggagcttatgtaccgatcgatccggaatatccggccgaccgcatccgctttatgctggaggattcaggcgcgaagctggtgctgacgcaatcgcatctggcggagcaagcatcgctgagtttcgacggccgggtgctggtgctggaccgtgaggacatctatcacgaagatggctcgaatctggagcccttggccggaccgcaccatgtggcctatgtgatctatacctccggttccaccggaaaaccgaagggtgtaatggtggagcaccattccgtgctaaaccggattttgtggatgcatgatcggtacggcttgggtgcggaaaatacgattctgcaaaagaccgccttcaccttcgacgtgtcggtgtgggagctgttctggtggtcgatggtcggctcaaaggtaagcctgctgtcggtcggcggggaaaagaacccggaagacatcgtcgacacgattgcccgcgatggcgtgactacgatgcactttgtaccagcaatgctgcatgcgttcctggagtatgtggaacagcagccacgagaagtgatgcaagcgaagctgggcacactgcgccatgtctttgccagtggtgaagcgttgccgccacagcatgtggcccggttccagcggctcgtgtcgagcctggccggagcgaagctggtcaatctgtatggcccaaccgaagcgacggtggacgtatcgtacttcgattgcgagcctgatggagcctattcggttattcctatcgggaaaccgattcaaaacattcgtctgtacatcgtcaaggaaggcacggagcaattgcagccaattggcgtggcaggggaactgtgcatcggcggtgtcggcgtagcccgcggttacctgaaccgtccggagctgacggccgagaaatttgtgaaagatccgtttgccggcggggaagcagggtatgagcgaatgtaccgcaccggcgatttggcgagatggatgccggacgggaacattgaatatctgggccggatcgaccatcaggtgaaaatccgggggtaccggattgagctgggcgaggtcgaaacgcagttgctccaagtggaatcggtacgcgaagccgtggtcatggctcgtgcagatgaaacgggacaaaaacacatggtggcctactatgttgccgggcaagaaatcagtgccagcgagctgagaagtgcgctggggcaggagctgccaagctacatggtaccatcgtactttgtacagctggagcagatgccactgagtcccaatggcaaaatcgaccgcaaggcactgccagcaccggaaggtagcctgcaaagcggagccgattatgtcccgccgcggacgtgggtggaagtgaagctggcgcaaatttggcaagatgtgctgggcctggcgcaagttggcgtgaaggaaaacttcttcgagattggcggacattcgctgcgggcgacgacactaacctcgaagattcaccaagagctgaacaagcagcttcctctgcgtagtatttttgaagcaccaacgattgaacaactggcggctgtgctggaacagctggatcaagtggcgtatgcgtccattccggtaacggaagagcgcagcttctatccactatcctcggcgcaaaaacgactgtatgtgctgcatcagttcgatccgcaggatgtgaactacaacatgccgtcggtgctgcaagtgagcggtccgctggacgtgaaacgagtggaacatatattccgtcaactgatcgcccgccatgcgaccttgcgtactcgctttgagctgatcgacagtgagccaatgcaatggatcgaggacaccgtaccgttcgaggtggaatatacgaaggtacaggcagagggtgcgactgcggatacagatcaggacacaactacagatacgtacaccagggtcaacatagaggcgcaacagctggtgcggcgctttgtccgtccgtttgatctcaaagctgcgccgctgctacgagtaggcttggtggatctgggccttcaaggagtagaacaggaatcccaacatctgcttatgctcgatatgcaccatatcgtctcagatggggtgtccctggaggtcctgactgatgagtttgtccgtttgtatggcggtgaagagctggcgccattgcggattcagtacaaagattatgccgtatggcagcaaagcgaagcccatcaggaatggatgcagcgtcaggaagcgtactggctgaacaccttccgaggggaactgcctgtgctggatctctctacggactttgcccgcccagcggtacagagtacggcaggggatacgatcgaatttgtactggagcgtgaggttagtgaacgcctgaaagaactggctgcccagaccggctctaccctgtatatggtgatgctggcggcgtacaccacactcttgcacaaatacacaggccaagaggacattgtagtcggtacgccgattgcaggacgaccgcatgcggagctcagtaatctagtcggtgtcttcattaacacgctggcgattcgcaattatccatccggcgatacatcgttccttgagtatctgcaagaggtcaaggagcaggcacttaatgcttatgagcatcaggattatccttttgaagagctggttgaaaaactgaatttaacccgggatacgagccggaatgcgctgttcgacacgatgtttgaattgaaaacatgggagcagcgggagttcgagctggaagggctgaccttgagctcctatccactggacaatcaaacggcaaaattcgatctgagcttggaggcgatagagcagccggaaggcattctgtgcagtctggaatacagcacagtgctgtacaagcgggagaccatgacgcgattggcacagcattttgcggaaatcgttcgagcgattgcctatcatccgcagcagccactggcagttttgaatatggtaaccgatgaggaacaagagcaactcatctacggttttggagaagtgggcgtatcggatgttgctgttgaagcaggagccctgttccatacctatgtggaaaaacaggcacagcttataccagatcaagtggcggtggtatacgaggggcaacagcttacgtaccggaaactgaacgagcgtgcgaaccaattggcgcgcagactaagaaatgaaggtatcggacgcgagtcgattgtcggcattttgagtgagcgctcggtagacatgctggtcggtgtgttggcggtatggaaggctggaggcgcatatgtgccgctggatgcggattatccgtccgaacgcattcgtttcatgctggaggacagcggtgcgacggtgctgttgacccagacgggattgcaggagcgcgcacaagcatggctgaatgaaagccaatggactttgggcgatgaaaaagctaagggtgagctggagacggcggttagcgctgaaacgatggaaagagacaacctgaatgaaggtttgagcttgaaatcagattcgaagtctgacagcgaagcagcatctgaatcggcaacaaagctgcgtctgcaaatcatgctggcattggacgatgagtcactgtacaccggagatacgacagacgttgatcacatcaatgaacctcaagatctggcgtatgtgatctacacctccggaacaaccggacgtccgaagggtgttatgatcgagcatcgctgcttggtgaatacggctgcggcgtatcgccgggattatcgcctgagcgagttcccagtccgactgctgcaactggccagcttctccttcgacgtgttcgtcggggatatggcgcggacgctctataacggcggcacgatggtcatttgtccgaaagacgaccgacttgattttagccgtctgcacggttggattcgtgattatcaaattaccgtgttcgaatcgactccggccctgatcgtaccgtttatgcagcatgtgcatgaacaggggctggacatgagcagcatggaactgctgatcactagctcggatagctgcagcgtgacggattaccgggtgctgcaagaacggtttggcgcagatatccgcatcatgaacagctatggcgtcacggaagcggcgattgactccagcttctatgatgaagaactgtcgaagctgccaagcagcggccatgtgccgattggtcaggcatggctgaatgcccgcttctacatcgtggacagccagctgaatccggtgccgatcggtgtactgggcgaactgtgcatcggcggcatcggggtcgcacgggggtacctaaaccgtgcggacctgacggccgagaagttcgtagcgaacccgtacgtaccgggcgaacgactgtaccgcacaggcgatttggcgcggtggatgccggacggcaatgtagactttatcggccgaatggatgatcaggtcaaaatccggggcttccggattgaactgggcgaggtggaagcgcagctgctgactgtggatggcattgagaaagccatcgtcaccgcctgggaaaacgaaaacggagacaaagatctgtgcgcgtatgtcgtagcctcggaggcgctgaatttgccggagctgcgcagcatactccagcccaaactgccgggctatatgatcccgacgtatgtcgtaccactggatcaattcccgctgacaccaaacggaaaaattgaccgcaaagcgttgccagcaccggaagcgcgcctcgaaggaggcacggagtatgttgcgccgcggacaccgctggaagagcaactggtacgtatttggcaaagcgttctgaatcatcagcgggtaggcatccaggataacttctttgaagtgggaggacattctctgcgcgctacaacactgatggcgaaaatccatcaggagctgaatcacaagctggccttgcgagatattttccaatatccgacgattgagcaattggtacaggtgatgggtgaagatcagacccagcaaatgtatgtatccatacctgtggcggaggagcgcgaatattatcccgtttcctcggcgcaaaaacggatgtacgtgctgagtcatctggaaggcggagaggtgagctacaacatgccaggagctttgattatcgaaggctccttggataaaaagcgactggaacaagccttccgccagctgattgcccgtcacgaaaccttgcgaacccgattcgagatggtggatggcgaggtgattcagcggattgaatctaacgtcccattcagcgtggagtatgtgcaagcaagcgaagaagagacaccgcagtacgcacaggactttgtacgtgcctttgatctcgcacaagccccgttgctgcgggttcagttgatcgaaaacggaccggggcgtcacgttatgctctatgacatgcaccatattatttcggatggcgtgacagaaggaattatcgtgcaggagttctctcaattgtatgaaggcaaggaactgccgcccctgcggatacagtacaaggactatgcggtttggcagcatgcagatatgcaaagtgaacgtcttcgtgcgcaagaaagctattggctgaacaccatgtctggtgaaattccggcactggatatgccaacggattttacaagacccgccgtacagcgtctggaaggaactcgatttgagtttgcgatctgcatggaggacagcgagcagttgaagcagctggccgcgcaaaccggatccaccttgtacatggtattgcttgcagcgtatagcacactcttgcataaatacacgggtcaagaggacatcatcgtcggcacgccgattgccggaagaccacatgcggagctgggtagcctagtaggcgtattcctgaacacactggcgattcgcaattatccgtctggtgataaaacgttcttggactacttgcaagaggtcaaagagcatgcgctcagtgcgtatgagcaccaggaatatccgtttgaggagctggttgaaaagctgaatgtaacgcgggatacgagccggaatgcgctgtttgatacgatgtttgagctgaaaacatttgagcagcaggagttcgagctggaagggctgaccttcaagccgtatccgacggacgatcatacgtccaaatttgatctgaccttggatgccgtagagcagtcagaaggcattctgtgcagtctggaatacagcacggcgctgtacaagcctgagaccatcgcgcgctttgcacagcattttactgaactcgtacgagccattacacttcacccacagcagtcactgtccgctttggatatggtaactgtcgaggaaaaagcacaaatcatctatggttttggagatgtaggcgtatcggatgttgctacagttgaagcagaagccttattccatgtctttgtggaagaacaggcccagcttgtaccagatcatgtggcggtggtgtacgaagagcaacaacttacgtaccgcacactgaatgaacgttcgaaccaactcgctcgcagactgcgaaatgaaggtatcggacgcgaatcgattgtcggcatttggagtgaacgctcggtaaacatgctggtcggcgtactggcggtgtggaaggctggaggcgcatatgtgccgctggatgcagactatccgtccgagcgcattcgtttcatgctggaggatagcggtgcgacggtgctgctcacgcaaaccagtttgcaggagcgtgcccaggcatggctggagaaaagcgatcaggccttggtcgaagggcagactgagggtgagctggaaacagcggctggcgctgaaacgatggaatcaggtgctcttcatggaaacctaaatggaacagcagattcgaagtctgacagcgaagcagcatccgaatcggcaacagggctgcgtctgcataccgtactggcattggacgatgagtcactgtacaccggtgatacgacagacgttgaacctatcaatgaaccgcacgatctggcgtatgtgatttacacctctggcacaaccggacgtccgaagggcgtcatgattgagcatcgcagcctggtaaatacggctgcggcgtatcgccgggattaccgtctgaaccagttcccggtacgactgctgcaactggccagcttctccttcgacgtgttcgtcggtgatattgcacggacgctctataacgggggcacgatggtcatctgtccaaaagatgaccggattgatccaagccgtctgtacggatggattcgcgattaccagattaccgtgttcgaatcgaccccggccctgatcgtaccgtttatgcagcatgtgcatgaacaggggctggacatgagcagtctggaactgctgatcaccagctcggatagctgcagcgtgacggattaccgggtgctgcaagaacggtttggtgcgaatatccgcatcatgaacagctacggcgtcaccgaagcggcaattgactccagcttctacgacgaagaactgtcgaagctgccaagcagtggccatgtgccgattggtcaggcgtggctgaacgcacgcttctacattgtggacagtcagctgaatccggtgccgatcggcgtactgggcgaactgtgcatcggcggcatcggggtcgcacgagggtacctgaaccgtgcggatctgacagccgagaagtttgtagcgaacccgtacgtaccaggtgaacgactgtaccgcacaggtgacttggcgcggtggatgccggacggcaatgtagactttatcggccggatggactatcaagtcaaaatccggggctaccggatcgagctgggcgagattgaaacggcgatccagcgggtgccgggtgtgcgtcaagccgtggtcatcgatcggacagacgagcgtggacacaagtatttgtgtggatacattacgggagaaacagaggagctgcggatcgaggaaatacaggcagccctggaagcaggactccccgcgcacatggtgcctgcacgcttgatgcgtctggaggccattccgctgaccagcaacggcaaaatcgaccgcaaggccttgccagagccggaaggcagcatccatacgggagcagcctatgtggccccgcgtaccaaggtggagcaagtactggctgcggtatggaccggagtgctgagcgtggaagccgtaggcacgcaggataacttcttcgagctgggcggcgattcgatcaaggctctgcaagtctcgtctcgcttgctgcaagcaggttatcgactggagatgaaagacctgttcagtcatccgacggtgtctgccttggcgctgaaagtccaatcggttacccgattggcggatcaaagcgaagtggtgggcactgtgaagctgacacctgttcagcattggttctttgagcaaaacctgacggatgctcatcatcataaccaatccattatgctgcatagcaaggacggttttaatgtagcggcgctgcgtacagcgatggatcaaatggttagtcatcatgatgcactgcggatcgttttccgccttaccgagcacgggtatgaagcttggaaccgcgcggtgggtgagggcgagctgtatacgctggaacgtatagacttcagccatgagactgaagtgtctgcagcgatcgaggccaaagtaaatgaaattcaggcgggcattcatttaagcgaaggaccgctggtgaagctggggctattccattgccccgatggagatcatttgctgatggctattcatcacttagtagtggataccgtatcctggcgcattttgttcgaggatcttacgacagcctatgaacaggcattgcacgggcaagcggctcgtcttccgcacaaaacggattcgttccgtaactgggctgaggcacagtctcactatgcgaacggtccagcaatggaagcagagttctcattctggaaagaagtggaacagggaaggtatgagccgcttccaaaagaccagccacagtcatcttccttgaataaagacagcgagcttatgacggtcacatggaccactcaggaaacggagcagttgttaaaacaagcgcatcgtgcctacaacacagatatgaatgatctgctgctgaccgcactcggcctggctattcatcgctgggcggggattgaacgcgtactcgtcaacttggaaggccatggacgggaatccattttgccagagctggatattacgcgcacggtgggctggtttacgagtcaattcccggttgtcctggatatgagcgcagggcaagatctttcacaacgtatcaaacaggtgaaagaagggctgcaccggattccgcaaaagggtattggctacgggatgctgagatacctatctgcagcatgtgagcaagcgcattttggaaccgaacctgaaatcagctttaactatctcggacaatttgaccaggatatgcaacatcaatccattggcgtgtctccttacgctagtggtgccgagcttagcgcacatgcagccagatcgcacacgctggatctgaacggactgatttccgaaggtcaattgcaattgacgatcagctacagccatcaggaatatcgcaaggaaacgatggaacagctagccgaagcgctcagaaccagcctgcaggaaatcatcgcgcattgcgcgggtcgcaaacagcaggaactgacgccaagtgatgttatgcttaaacctgtaaccttggccgagctggatcagttggtcgaacggacgcgtgacatcggggaactggaaaatgtatatgccttgacaccgatgcaaaaagggatgttgttccatagtctgatggatgcagaatcaggggcttattttgaacaaacgacctttgatctacacggacgtttccaagcggatattttccaagatagcttgaatcagctggcgcagcggcatgagatctttagagctaatttcattagcggctggcaggatgagcccgtacaggtgattttccgccataaagaggttggtttcagatgtgaagatttgcgtcatttggatgatcaggaacgtgacgcgtatgtgcaggaatttattcgccaggacaaggcagctggattcgatttgtcccgggatgcgttgatgcgcgtggcgattttgcggacaggtgatgaggattattattttgtatggagttctcatcacatcctaatggacggctggtgtgtggcgttggtaacggatgaggtgtttgaggtttactttgcagccgtagagcatagagcaccgaagctcccccctgtgactccatacagtcagtatattgcgtggctggaagcacaggatgtagaagcagcagcctcgtactggaaggaatatttgctgggctatgatcaacaaacttcgattccgaccggaaaagtaggcgcgaaagcggacggcgaacaatttgagcatgtactgtgcgacctaggtaaggatttaacaggacgtatggaaatggtagccaagcagtatcacgtgaccaccaatacgctcctacaaacggcctggggcttactgcttcaaaagtacaacggtagtaacgacgctgtctttggcggtgtagtatcgggtcgcccggcagatatttcagggatcgaaaacatggtgggcttgttcattaacaccattccagtacgtatccgtagtaaggctgaggacacctttgccgacctgattagagcgaatcagcagcaggcgctggcttctcaagattatgaaacgtatccgctgtatgaaattcaagccttgaccgagcaaaagcaagagctgatccagcacattatcgtgtttgaaaactatccggtggaggagcaggtcgagcagcttggcgaaggtgcggaatcggattttgtcatcagcaatgcagggatgattgaacaaacgaactatgatttcaatctggtcgtcatgccgcaggaagcgatgaaaatccgattcgaatacaatgcgaagttatatgatcgggaagcggtggaacggacgcagggtcatctggtacagctgctggagcaggtggtagcgcagccggacattcaagtgcaggagctggatgtgttaagcgagcaggaacgcgagcaaattctccgtgtatggggagatacagctgctgagtatccaagcgatcaaacgatccatggcttgttcgaagcacaagcagtgcagacaccggaacagccagcgctgtacttcgaaggagagcagttgacctatcgcgagctgaatgaacgtgcgaatcgtctggctcgtaccttacgcagtcaaggcgtgacgaaggatcggctggtgggtctgatgaccgagcgttcggtagacttgattgtgggtatgttaggcattttgaaagctgggggcgcatatgttccaatcgatccaacgtatccagaggagcgtatccgctatatgctggatgactcgggagcagagctgttgttgacgcaaagccacttggtggacaaagtagctttcgacggtcaggtgctggtgctgaatggggcagagagtgtgcatcacgaggatggctccaatctggagccgttgtccggtccgaacgatctaacgtatgtgatttatacgtcgggtacgacggggcagccgaagggtgtcatggtagagcatcgcaatgttgtgcgtttggtgaaaaatacaaactacgcgcagttggatgctgacacgcgcattttgcagacaggcgcgattgttttcgacgcatccaccttcgaaatttggggagctctattaaacggtggacagcttgtgttagtgagtcaggatgtcattttggacgcgctcaagcttaatgaagctgtccgcagtcatggcattaccacgatgtttctgaccacaccgctctttaaccagctgtcccagcagaatctggcgctgttcgagggggtacgggagctactggttggtggtgatgtgatgtccgtaccacatatgaaccgggtgctggaggcccatccgtccctgcgaatcagtaacatctatggccctactgaaaatacgaccttttccacagtacacgcgatcaccggtgtacaatcggaatcggtgccaattggcagaccaatccataattcgacagcgtatgttgtggaccgttcgatgcggcttcagcccgtgggggtatggggtgaactactggtaggcggtgacggggtagcacgtggttaccgcaaccgtccggacctgacatccgaaaagttcatcgacagcccgttccgtagcggagaacgctgctatcgcacaggcgacatggtacgcttaaatgcggatggttcgctggaatataaggggcggatcgatgcgcaggtgaaaattcggggctaccggatcgaactgggcgaggtagaaacgcagctgttgaaactggaggcagtgcgagaagctgtggtcatcgcatgggaagatgagcaagggcaaaagcagctctgcgcttatgtggtcgccgatgaggaagttgtcgcaagtgagctacgcagcgctttgagccagaagctgccgggttacatgattccttcctatgtgatacagctggaacaaatgccgctgacaccgaacggtaaaatcgaccgcaaggccctgccagcaccagagggcagcctgcaaagcggagccgactatgttgcacctcggacatgggtggaagtgaagctggcgcaaatctggcaggatgtactgggtctcactcaggtcggtgtgaaggaaaacttcttcgagattggcgggcactcactacgggcgacgacactggcctcgaagattcacaaagagctgaacaagccacttccactgcgcagtatttttgaagcaccaacgattgagcaacaggccgttgtactggaacagctggaccaagtaacctatgcgtccattccagtaacggaaaagcgcagcttctatcccctgtcctcggcgcaaaaacgactgtatgtgctgcatcagttcgatccgtatgatgtgaactacaacatgccgtcggtgctgcaagtgagcggtccactggatgtgaagcgggtggaacatgcattccgtcaactgatcgcccgtcatgcgtccttgcgcacccgctttgatctgatcgacagtgagccgatgcaatgggttgaggacacggtgccgttcgaagtggaatatacgaaggtacaagcagagggtgcgactacggatacagacacgagggtcggcaagaaagtggatgagctggtgagtcgctttgtccgtccgtttgatctcaaagctgcgccgctgctgcgagtaggcttggtggatctaggcgtccagggagtagagcaggaatctcaacatctgcttatgctcgatatgcaccacatcgtttcggatggcgtgtccatgggggtactgactaatgaatttgtccgcttgtacgacggtgaagagttaccgccactgcggatacagtacaaggattatgccgtatggcagcaaagcgaagcccatcaggaatggatgcagcgtcaggaagcctactggctcgataccttccggggtgaactgcctgtgctggatctaccgacagactttgcccgtccggcggtgcgaagtacggcaggcgatattgtggtgttcggactggaacgtgaagtgagcgaacgcctgaaggaactggcggcgcacaccggctctacactgtatatggtgctgctagcggcgtataccgcactcttgcaccaatacagcggccaggaggacatcgtcgtcggcacgccgattgccggacgaccgcatgcggatttggagccgattctcggcatgttcgtgggtacgttggcactgcgaaactatccgacagcagaacataccttccgcagctacgtggaagaagtgaaggttcgcgccctgcaagcctacgagcatcaggactatccatttgaggagctggtggaaaagctgaatgtgaagcgggatatgagccgccatccgctgttcgatacgatgtttaccctgcaaacgaccgaggaaggtgagctgcaactggcgaacctgagcttccgtccttatggcctggagcaaacgccagcgaagtttgacttgacgctggaagctagagaggaagaggcaggcatccagttcggattgcagtatgccactgcgttgtatcaacgggaaacggtcgaacggatgacacgtcactttattcgcttggccgaagctgtggcagtgaacccggatgcgaagctgggtgagctggagctcattacgactgaagaaaccgagcagattctgaaggtattcaatgatccgaatgcgcatagcgtacgcggaacactgcaagggctgtcgctcagcgagcgttttgaagagcaagcgaagaaccatcctgagcggatagccgtggtgtctggggatatggcgctaacctacgctgagctgaatgagcaggcgaaccaattggctcgtgtgctacgggcgaaaggggttgaagcagatcacccggtaggcatactgctggaacgttctgcggatcttctggtgagcattctggcggtactgaaggctggaggcgcgtatgtgccaatggatacgatgtatccacaggagcggatcgactatatgcttcaagacagtggggcgaaggttgtaatcacaagcagagccgccaacctgtcacttcaactgccatcgacagtacaagctatcgttcttgacgatgaggacgtacaggctcaattgggagcacaggatgcgagcaacctgatccctgtcgccggcctgtacaacctggcctatatgatttacacgtcaggtacaaccggtcagccgaaaggggtcatgatcgagcagggcagtgtcagcaatctggtagatgctttatacgagcgggtatacagccggtatgatcagccgcttcacatcgcatggctgtccgcatttgtatttgacgcttcagtgaagcaaatctttgccagcttgctgctaggccacaccctgcatgtggtgtcccgtgacgtcagcctgagcggagagcatttgatcgcctactatcgcacgcaccgaatcgatctgtcggacggcacaccagcgcatctgcatattttgaacgaaagcgtcaatgtgaccgaagcgccggatgtgaagcattacctgatcgggggcgaggccttatccgtgcagctggtacaggggttcctacacaaatggtccgggtatcgcccggtcattacgaacgtgtatggtccgaccgaagcgacggtagatgcaacagcctatacgattgaaggtgtagagtcactgaatggactgctggaaaaaggggagcatacagtatccattggaacgccgatagcgaaccaggctgtgtacatcttgaacactcgacaacagctggtaccgatcgggatcgcgggtgagctctatattggaggtgcaggtatcgcacgaggatacctcaacctgccggaactgacggctgagaagtttattccgaatccgtttgcctcggctccactggaagtcgaacaagctccaaatgcccacagcaacctgatgtaccgaacgggcgacctggcacggtggctgccggatggcagtatcgagtatttgggccggattgaccaccaagtgaaaattcgggggtatcggatcgagctgggcgaggtggaagcgcagctgctgaccgtggacggcattcaaaaagccgtggtcacagcctgggaaaacgaagacggacacaaggatctgtgtgcctatatcgtagcttcggagtcgctgagtttaccggaactgcggaatgcgctgcagccgaagctgccggattatatgatcccgacgtatgtggtacagctggatcgtttcccactgacgcccaacgggaaaatcgaccggaaggcactgccagcaccggaagcgcgccttgaaggaggcctggagtacgtggcaccgcggacgccactggaggccaagctagcccaaatctggcaggatgtcttgaagctgtccagcgtaggcgtcaccgactcattcttcgatgtgggtgggcattccctgcgggccacgacactggtggccaaaatccatcaggaactgggcagccgaatgacactgcgtgaggtgttccaacactttacgattgagcagcaagcccaactcattgcaacgcacgggacagacacctatacggtgatccctgctgcgacgaaacagtcttactatcctgtctcctcggcgcaaaaacgactgtatattttgagccatctggaaggtggggatctcagctacaatatgccgggtgtattaacagtggagggaccgcttcaggcagatcgactggaggaagcgttccgtcagttagtagcccgtcatgaaacgctgcgaacttcctttgaaatggtggacggcgaggttgttcagcggatttacgatcaagtggagtttgtcgtagaacgcctgcaggccagtgagtccgaagcggaagtgtatatcgagtcctttgtacgcagcttcgatcttcggcaggcaccgctgctgcgtgtccgtcttattcaaaccggacccgagcgccatctcctgatgtacgacatgcaccatattatttcagacggggtatcgtctaacaatatcgtgcaggagctgggacaactgtacgagggacaggccttggagccgctgccaattcagtacaaggactatgcggtgtggcagcagcaggaaatgcatcgtgagtcctaccagcgccgggaacagttctggctggagcatttagccggggaattaccggtactggatctgccgattgcttatcctagacctgctgttcgcagcttcgagggggcaatgtatgagtttaccgtggccccgaatgtatccgagcagttgcaccggatagcggcacagactggaagcacattgtatatggtgctattgagcgcctacaccgtcctgttgtccaaatacagcggtcaggacgatttgatcatcggtacgccggtagcaggccgcttgctgcctgaactggagccgctgatcggcatgttcgtcaatacactagccatccggcaccagccgcagggcaaccaaactttccataactacttgctggaagccagagatcgtacgctgcaagccttcgagcatcaggattatccactggaagagctggtggaaaagctggatgtagcgcgggatgcaagtcgtaacccgttgtttgacactgtgtttgtactggaaaatacggagtcgcaggaagcacaacttgaaacactatcctttagtccttatgttaaggaacacaggacctccaaattcgatttgaccttgtctatgagtgatgaagacgggcagatcaagggttcctttgaatattgcacgaagctgtttggcgcagatgctattgaacgattaatcggagatttgatagcgatcctgtcacaggttggagccaatccagatttgctattaagcgatcttcaggtaaactcggacgagcaagcagaaggcttctcgcccgattccatcgattttattttctaa

SEQ ID NO: 412 - DNA, 42390 bp, Paenibacillus polymyxa
  source 1..42390: mol_type = genomic DNA
  misc_feature 1..42390: note = strain LU17007
atgacacagcaagatgttcaattgttttccttaagccagccacagcaacgtatttggtacacggagcttttgtatcctcatcggaacacttcaaccattattgctactgtaaaaatcagaggaactgttcgtatagatgcattgcagcaagcaatgaaccgggtgattgcccaaaacgattctttccgtatcaaaatcactgctcaggatggaatcccatatcaatatgtagagccgtttacagtggaaagtattgaaacgcttcaagtaaccccggaagaagcgaatgaatggttaaagcgccataatccacagccgttctcattgttggattcgcagctgtaccgatttgttattttgcagttaggggcagaagaaacctggtttaattttaaaatgcatcatattatttcggacggggtgtccatgaatcaggccattaatgaaatcactggacattatatggatattgttcatggtacaggccaggatgcaccgagcaagagcaatccttatctggattttattcaggtagagcaaagctatgagcaatctgatcgctatcaaaaggacaaaacgtattggacggaaaagtttgctgatttgccagagaccacaggtctaaaatcatataacccgctgacactgagcacagctgcacgccgggaaagttttatactggaacatggattgtatcgtggtgttacggctttttgcgaggaacataaaatcagtattttcacgttcttcctagccgctctgtatatttatttgcataaagtgacgggtgagcaggacttaactgtaggaacactctatgccaaccgtacgtctaagaaagaaaaggataccatcggcatgttcgtcagcaccgtggctacgcgtctgctggtcgaaccggaatccgaactgctggccttcttacagggtgtagggaaggagcaggcgtccattttgcggcatcagcgttacccgtacaacaaaattattcaagatttacgtgaacagcaaagcagtatggacatccagcgtctgtttggggcatccattcagtaccgtacattgagtttctctcgttttgatgaagcgattcagcaggtggataacgatttctgcggagatacagtgaatgacttcgatattcacatggttgaaatgctggatgacgatagactcgtattatacctggattatcgtaccgagctgtttagtgagcaggaaattgctcgaattattcgacaatttttgagtgtggcggagcatatggtacagggcccacacaagcgaatacaggaattgtcgctgatcagtgaggaagaacgggcggaaatcgtcgacgtattcaatgctacaacagtggaatatccacacgaagcaggcattcatgagctgtttgaggaacaggcggcacgtacaccgaatcagacagcagttgtgtctgacaatgcctatttaacttatggcgaattgaatgtaaaagccaatcgattggctcacacgctgcgcgggcacggtgttactgtcgagcgaactgtaggtatcgttgcagagcgttccgcagatatgatcgttggtatgcttgcgattctcaaagcgggcggcgcatatgtgccaattgaccctgattatccggctgaacgtgtgcgctacctgttggaagattcgggagcggagttgctgctggtgcagcatgcggaacagcaaccggaggattacaccggaattgtgctggatctgagtgatgccgctgtgtacgggacaaagaataaccaagacgtgaataacatacatggggaacaaaacgaagctagtcatgcagattttacccattatttaaatctgaaaaatgagaatttaaaagaatcttcttcgtctgtcgtagacagtactactggagcacatacatttggcaatcgactagcctatcttatgtacacttcgggtacgaccggacagcctaaaggagttatggtagagcatcgcaatgtcgtgcgtttggtgaaaaatacaaactatgcgcaactgggtgctgacacgcgcattttgcaaactggtgccgttgtctttgacgcgtccaccttcgaaatttggggtgcgttgctgaatggaggacagcttgtactggtaagtcaggatgttattttggacgctccgaagctcaaggaagctgtccgcagccatggtattacgacaatgtggctaactgcgccactctttaaccagctatcccagcaggatctggagttgttcgagggggtacaagaactgctggtcggcggtgatgtgttatccgtaccgcacattaaccgggtgctggaggctcatccgtccctacggattatcaacggctatggcccaacggaaaatacaactttttctacaactcatgcaattgctggcgtgcaatcggaagcggtaccgatcgggcgtccgatctacaactccacagcgtatgttgtagaccgttccatgcagcttcagcctgtgggagcatggggtgagctaatcgtcggcggcgacggggtggcacgtggctaccggaatcgtcctgatttaacggctgaaaagtttatagacagtcctttccgcagcggtgagcgctgctaccgtacaggcgatttggtgcgttggaatgaggacggaacgttggaatacaaaggacggatcgacgcgcaggtgaaaatccgtggctaccggattgagctgggcgaggtggaagcgcagctgttgaagctggaggcggtgcaagaagctgtggtcattgcacgtgaggatgagcagggacaaaaacagctctgcgcatatgtggtcacccttgcggatatcacagcaagtgagctgcgaagcgacttgagtcaggaattgccgggttacatggtgccgtcgtatttcgtacagctggaacaattgccgttgacaccgaatggcaaagtggatcggcgtgcattgccgcagccggagggaagcgtggattccggcgaggattatgtagccgctcgtaatgaggtagagcggacattagtatcagtatggcaatctgtactgggtatcgaacagattggtgttctggataacttttttcatttgggtggcgactcgattaaggccatccaggtgtcttcaagactgctgcaaaatggttacaagctggaaatgagggagctgttccagtatccaacgattgctgagctgaatggacgagtgcagcgggtgacccgcgtgtccgatcaaagagaagtcagaggaaacgtggcattgacaccgattcagcactggtttattgaacagcagccatcccatcctgaacactacaaccaggctctgatgttacaccgtgaggatcgtttggacgaaacggcgcttcatcagacattgcaacgcattgtcgagcatcatgatgctttgcgcatcgtattccgccagaatgcagacggtggttatgaagcatggaaccgtggcgtgcaagaaggagagctgtatagcctcgaagtgatggattataccacggagtctgactttgctcatttgctggagaacaaagccagcgaaatccaaagcagcatccgtctagatgaaggtcctctggtgaagctgggtctgttccgttgcatcgatggagaccatttgctggtggcgatccaccatttggtggtcgacggcgtgtcatggcgtattttgctggaggatctggcatccggctatgagcaggctttacgggacgagtctgtccgcttgccgaataagacggattccttccgcctgtgggcagatcaactggcagcttatgcgaacagcaccgcgttggagaaggaacgtgcgtattgggagcaggtggagcgagctggtgctgctcaagaggcattgcctaaggattacactcgtaaatctcaggccaagccacagcttcgtgatgatcgaacactgaccgtagcgtggacggtcgaagaaacggaacaattcttgaaacaagctcatcgggcctacaatacagaagcaaacgacctgctgctgacagctctgggcatcgccattcaggagtgggcaggcatccgtcaggtgcttgtaaacttggagggtcacggacgggaagccattttgccggatatggatattacgcgcacggtcggttggtttaccagccaattcccagttgtactggatatgggcgaagaccggaatgtgggacagcgtgtcaagaacgtcaaggaagggctgcgccgtttgccgcataaagggattggatacgggattttgagatatcttgctgacagagaagggaaagcagcttttgttgccgagccggaaatcagttttaactatctcggacaattcgatcaggatttgaaaaataatgcattccgcatgtctccttattccatcggggcctccatgagtgacacattgaccaagcggtatgcgctggatatcaacggcatgatcacagacggcgcactggaactgacgatcagctacagcaacaaaatgttcatgaaaaaatcaatcaaaaagctggctgatttacttcaggagagtttacgtgaggtattggctcactgtgtggtcaaagagttgccggagctgaccccaagcgacttgtccttccaaggactaacggccggagagctggatcatattgtagagcagacggctgctgcgggggaactggaaaacatttattcgttaacacccatgcaaaaaggcattctgttccacggcttaatggagccgcaatccggggcgtattttgagcaggcgacatttgatctacaaggcagctttcaagtggaggcttttgccgaaagcctcaatcaactggtggatcgccatcaaatattcagaacgaatttttatagcggctggaatgaacagcccttacaggtggtgtatcgacacaaacatgcggggttccgttttgaagatatacgcttgatgggacaagaagagcaggacgcgtacattgctgattttgctgagcgcgacaaaggcgaaggctttcatttcagctcaggcgagctgatgcgggtgtctattttacgtacaggtgaggagtcttaccgttttgtatggagcttccatcatattttgatggacggttggtgcttgttcctggttgtaggggaagcatttaatacgtactttgccatcctcgaagaccgcaagccggagcttgtcccggtaacaccatacagcgaatatattgaatggctggatcggcaggacaagacggaggctgaacggttctggcgcgattattttgcgggctttgagcagcagacggtattgccgcaggtcaaacagctggacggtcacgctaaagcatatgaagcggacaagctttcgtttacactgggccgtgaagtgacggagcggatgaacaagctggttaagcagaagcaagtgacggtcaacacacttttgcaagcagcgtggggcgttgtgctacagcggtataacaacagccgggatgtggtatttggcagtgtcgtatctggtagatcagcagatattccgggcatagacaaaatgattgggttgttcattaatacggttcctgtacggattcacagtgagaaagatatgacatttgctgggctgatgaagcagatccaggagcaggcactggcttcccgtgcctacgaaacctatccgttgtatgacattcaggccctgaccgagcagaaacaggacttggtaaaccatattatcgtgtttgaaaactacccggtagaacagcgcatggagcagatgggtagccgtggcgcgaatggctttacgattgccaatgcttccatgtcagagcaaacgaactatgatttcaacattaccgttgtgccgggtgatgaaattcatttccatttggagtacaacgcgcgagtgttggaacgtgcagctgtagagcaaatccgtgagcatttgctgcatatgattgaagaagcgattcacagaccagatgcacgggtagatgagcttgaattggtgactgctgcggaaaaagcaaaaatcatcgatggttttggatcagtaggcgtagctgcgtggactgatgaaaaagaatctaatttgttgttccacgcctatgtggaagaacaggcacagcttgtgccggatcacgtggccgttgtatacgaggaacggcagtttacgtaccgcgagctgaacgagcgtgggaaccagcttgctcgtagattgcggaatgagggcattggacgcgagtccattgtcggtattttgagtgagcgctcagtggacatgctggtcggcgtactggcggtgtggaaagccggaggcgcatatgtaccgctggatgcggattatccgtccgaacggattcgctttatgctggaggacagtggtgcgacggtgctgctaacgcaaaccggtttgcaagagcgtgcacagggttggctggaggcaagtcggcaggccttggtcggagggcagactgagggtgaattggaaacagcggctggcgctgaaacgatggaaagagacagcctgaatgaaggcgtaagcttgaaatcagattcgaagtctgacagtgaagcagtatccgaaccggcaacagggctgcgtctgcgtactgtattggcattggacgatgagtcgctgtacaccgggggtgtcacggatatcgaaccgatcaatgaaccacacgatttggcatatgtgatatacacgtctgggacaaccggacgtccgaaaggcgtcatgatcgaacatcgcagcctggtaaatacggctgcggcgtatcgccgggattaccgtctgaaccagttcccggtgcgactgctgcaactagcaagcttctccttcgacgtgttcgtcggggatatggcacggacgctctataacggcggcacgatggtcatttgtccgaaagatgaccgcattgatccaagccgtctgtacggatggatacgcgattaccagattaccgtgttcgaatcgactccggccttgatcgtaccgtttatgcagcatgtgtatgaacggggccttgacatgagcagtctggaactgctgatcaccagctcggatagctgcagcgtgacggattaccgggtgctgcaagagcggtttggcgcggatatccgcatcatgaacagttacggcgtcaccgaagcggcgattgactctagcttctatgacgaagagctgtcgaagctgccaagcagcggccatgtgccgattggtcaagcgtggctgaacgcacgcttctacattgtggacagccagctgaatccgatgccgattggcgtactgggtgagctgtgcattggcggtgctggcgtggcacgggggtacctgaaccgtgcggacctgacatccgagaaattcgtagcgaacccgtacgtaccgggggaacgtttgtatcgcacaggcgatttggcgcggtggatgccggacggtaatgtggactttatcggccggatggactaccaggtcaaaatccggggctaccggatcgagctgggcgagattgaaacggcgatccagcgggtgccgggtgtgcgccaagccgtagtcatcgaccggacggatgagcgtgggcacaagtatttgtgcggatatatcacgggagaaaccgagctgcggatcgaggaagtgcaggcagagctggaagccggactgccagcgcacatggtgcctgcgcgcctgatgcgactggagaccatcccgctgaccagcaacggcaaaatcgaccgcaaggctttgccggagccagaaggcagcatccatacgggagcagcctatgtagccccgcgtacccaggtggagcaagtactggctgcggtatgggctggagtactgggcgtggaagccgtaggcacgcaggataacttctttgagctgggtggcgattcgatcaaagcactgcaagtatcgtctcgcttgctgcaagccggctatcgattgaacatgaaagacctctttagtaatccgacagtagcagcactcagtcctttgcttcgtacagatggcaagatggccagtcaggaagaggcagtaggcccggtggaactgacacctattcagcgatggttcttcgagcagcagccggccgacctgcaccacagcaaccaggcgatgatgctgtatcgagctgggcgctttgacgtcgacgcgctgcgccgtacgatggaccgtatggtccagcatcatgacgcattgcgcacggtattccgtgagacggggcagggctatgtcgcttggagccgcagtgtagcggaaggcgagctatacacgctggacattgtagatttcagcgcagtggaagacgaatccaccgctgttgaagccaaggcgagtgaaattcaagcgagcattcatttgagtgagggtccacttgtgaagcttggtctgttccactgcgctgagggcgaccatttgctaatcgtcattcatcatttggttgtggacggtgtatcgtggcgtattttactggaagatttggcatccggttatgagcaggctgttgcaggtcaaaccggcacagcgatccgactgccgcataaaacagattcattccaggtatgggccaaacagctgtcagcctatgccaacagtgcgacgatggagcgggagcttgcttactggcagcatatcgaacaagcagaagctagccttgtgaagcctttgccgaaggattttgcaaatgacaatgctctgcttggagacagtgaggttgtgacgatccgctggacgaagcaggaaaccgagcagctgctcaaacaagctcatcgcacgtacaacacggaaatgaatgacctgttgctggctgcgctcggaaaagcagtctatgactggtctggttccgaacgggtgctggtcaatctggagggccatggacgggaagccattgtatcggatgtggatattacgcgcacggtcggctggtttacgagccagttcccggttgtactggatggaagtttgggacaagggggacataccgctcgtctgatcaaaaggatcaaggaagggctgcgtcatattccgcaaaaaggcatcggctacggtattttacgatacctgtcggatatgaatatgctggagaaagcaggcgtgcggttacaggctcagcctaagatcagttttaactacttgggccaattcgatcaggattataaaggcaatgatctacagccttccgcctattctatcggtgtgcctgtcagcacgaacgcgactatggattttgcgctggatatcaatggagtaatcgaagatggcgagttgatgttcacgattcgctacggcacaacgcagttccgtcatgaaacgattgaacggcttggagagctgttggcatccagcttgcgtgaggtgattcatcactgtgttgcccaagaaagaacgatgctaaccccaagtgatgtcctgttaaaccatgtaacgctggatgagctggagcaattggtggaagatacgcgagatctgggcgagctggaaaatgtgtatgccttaacgccgatgcaaaaggggatgctcttctacagcctgatggatgagaattcggcggcttattttgagcaggccacctttgagttgaacgggcgttttgatgtggttactttcggtaaaagttttgatttgctcgtacagcgtcatgaggcattgcggacgaactttatcagttcatggaaggacgagcctgtacaggtcgttttccgcaaccgtagcggacaattatattatgaagacctgcgcggactggaaaaagaggaacgagcagctcgtgttgaagcttttgtcatcgaagataaagcaaaaggattccatctggcagaggatgcactcattcgtgtttccattttgcaaaccggggatgaaacgtaccactttgtttggagcttccatcacattttgatggatggctggtgcttgtcctttattacacaggaggtattcggtagctatctggcactgcgcgcgggtcatgagccagcgctggagccagtcacgccgttcagccgatttatcgaatggttggagcgtcaggaccgtgaggcggccttgcaatactggagtgggtatctggcggactacgagcagcaaattacgcttccacagcaaaaaacacagtcgaaatctttacaatccggggagtatgtcgctgaagatctggaatgtaacttccagccagagctggttgctcagatcgaacgggtggcgaagcaaaatcaggtcacgatcaatacgctgattcagacggtatggggcgttctgttgcaaaaatataacaacagtacggatgtcgtgttcggtagcgtcgtgtccggtcgtccaggggatattccaggcgtggagcacatgatcgggctgttcattaataccattccagtgcgtgtgcagtctgaacaaggtgaaacctttgtcgagctgatgaaacgaacccagcagcaggcgctggcttccaatgcctacgatgcattcccgttgtatgaaattcaggcgctgaccgagcagaaacaggatttaatcaatcatattatgatatttgaaaattatccggtgggacagcaggtagaacagttaggtagcgagggacaggataaatttacgatttcgaacgtggtggctacagaggaaaccaactacgatctgaacgtagctgttatgccgggagaaggcatcaagattcgctttatgtataacgcgctcagctttgatcaagcaggtattgagcgtctgcatgggcatttagcacgcctgctggagcaaatttcgctcaacccgcatgttcgggttgaagagctggaattagtcacagcagcggaaaagcagcagattacaggagcgtttaatgcgacggcttcagcatatccaagccatcagacgatccaaaagctgtttgaggagcaggctgaacgcacaccagatcatgtagctgtcgtttgggagcatcaatccttaacctatcgtgaactgaacgagagagccaaccgtcttgcacgcaccttgcgcacagaaggagtagaatcggaacagccggtaggcattctggcgcagcgctcgctggacatgatcgtaggcatctatgcgatccttaaggctggcggagcttatgtaccaatcgatccggaatatccggccgaccgcatccgctttatgctggaggattcgggagcgaaactcgtgctgacgtcatcgcacctggccgagcaagcatcgctgagtttcgacggccaggtgctggtgttggaacgcaacgacatctaccacgaagatagctccaacttggagccgttgtcggggccacatcatgtcgcctatgtgatctacacctccggttccactggaaaaccgaaaggtgtaatggtggagcaccattccgtgctgaaccggattttgtggatgcatgatcgctacggcttgagtgcggaggatacaattctgcaaaaaaccaccttcaccttcgacgtgtcggtgtgggagctgttctggtggtcgatggtcggctcgaaggtgagtttgctgtcagtcggcggggagaagaacccggaagacatcgttgacacgattgcccgtgatggtgtgaccacgatgcactttgtacctgctatgctgcatgcgttcctggagtacgtggagcaacagccacgggaagtgatgcaagcgaagctgggcacgctgcgccatgtctttgccagtggtgaagccttaccaccgcagcatgtggcgaggttccaacgtctcgtgtcgagcctagcaggagcgaagctgatcaacctgtacggcccgacggaagcgacggtggacgtatcgtacttcgattgcaagctggatgaagaatatacagttattcccattgggaaaccgattcaaaatattcgtttgtacatcgtgaaggaaggcaaagagcaattgcagccgattggggttgcgggtgagctgtgcatcggcggtgtcggcgtagcccgcggttacctgaaccgaccggagctgacggctgagaaattcgtagccgatccgtttgctggtggggaagcaggctatgagcggatgtaccgcacaggcgatttggcgagatggttgccagacgggaacatcgaatatttgggacggattgaccatcaggtaaaaatccggggttatcgaatcgaactgggcgaggtggaaacgcaactgctccaggtggaatcggtacgagaagccgtggtcatggctcgtgcggatgaaacgggccaaaaccaaatggtggcctactatgttgcggggcaagaactcagtgccagtgagctgagaagtgagctgggccgagaactgccaagctacatggtaccatcctactttgtacagctggagcagatgccactgagtccaaacggcaaaattgaccgcaaggctctgccggtacccgaagggagtctgcaaagcggagcggagtatgtagagccgcgcactggagccgaacgggcactcgtagcaatctggcagtccgttctgaacgtacaaacggtcggtattttagacaacttctttgatctgggcggcgactccatcaaggcgattcaattctcttcccgactgcttcaagccgggtacaagatggatatgaaggacttgttcaaatttccaaatgtgaaggagttggctccgcatcttcggttagcggacaagcaaacgaccgagcaaggcgaggtcacggggaaagtggcgctaacgccgacccaatactggcttgcagaacaagggcaagtgcatgcgtatccatttaaccaggcggttatgctgcatctggagcagggctttgacgaatccgctctacgtcaggcgctcatgaagctaactgagcaccatgatgcattacgtatggtgttcagaaagacggagcaaggctatgaagcatggaaccgtggagtacatgagggcgaattgtatcatctggatgtattgaactttagagatgtcactgatgaagccttgcttagtgcgacgattgaggcgaaagtcagcgaaattcaaagcagtatttatgtgcatgaaggcccgctatttaaagctggtttgttccactgtgcggatggggatcatttgctcatagccatccaccatttggtggcagacgggggatcgtggcgcattttgttggaggatttagccacagtctatgagaaagccgtccatcaagaagtgcttcagttaccggataaaacggactcgttccgttcctggtctcaaagactgtacacctatgcgaatagtgcagcactggaaggcgaacgcgcctattgggagcatctgaacgcatccgctttggctgaccaggtacgcttgcctgaagatcaagcacaggatggcaaatttatcttggctgacacgggtaaaatggtcgttaagctttcggaagaagagacagaacggctattgaagcaagcgcaccgcgcatataacacggaagtgaacgatctgctgctgacagctttgagcatgatgctgtacacatggaccggtcatgaacgtagcctgatcaatttggaaggatatggacgtgagggcattttaccagatacggacctttctcgtacggtaggttgctttacggttcaatatccaatatggctgaacatcggcagtgattctactttatcgggacgcatcaaacaggtcaaagagagtctgcgtgatatcccgaataagggaattggctacggaatctggagacatttgaatgaatccggccaagccacgggtcagcaagcagatgcactgaatctcggtcaacatcaagcttttgccgagccacaggtaagcttgagttatcacggacagtttgatcaggagttgcaaaacagtgatatccgtatgtcaccttactcgattggatcggtcgttagtggtcagctggagatgaaatacgatttcattgtggacgcgagtgtaaccaacggtatcctgaaactggatattcgatataacagcaaggtcttccgtaaggacaccatccaaatgctggctaacctgctaaaagccaatctgcttgaaattatcgagcactgtgttgcaagggagcagaacgaattgactccaagtgatgtactgtttaaaggtctgaccttggagcaattagatacgattaaggagcagacaaagacggttggggaattggaagacgtgtacccgctaacgccaatgcaaaagggtatgctgttccatagtttgatgaatacacaaaccgaagtgtattttgaacagttgacgtttgatcttgaaggagagtttgaaccgagcatgtttgaggaaagcgtgaagctgctcgtaagccgtcatgcaattttccggacaaatttctacagtggctggcatggtcaaccgttgcaggttgtctatcgtcataaaaatccgagcttccgttacgaggatgccagagggcgtgaacacactgtagctgaatttgtgactcaggacaaagctcgaggctttgatttaggcaaggatgcgctgatgcgtatagctgtcttccgtacaggggattgctcataccgatttgtatggagcttccatcatatcctgatggacggctggtgtctgtcacttgtcatggaagaagtgctaagtgcgtattcgtctttgatgaagaacaggcagccggaactaccacctgtcagatcatatagccgttacattgaatggctggaacagcagaaagcgcaggaagcggctcgctattggagcgactatttggcgggttatgagcaacagaccttgttgcttggtgagaaagcgcaggcttctgtaacagtgcagaatgaggatgcagacggaagtgacgggcgttcggatacaggctatgttttggagaaggtgacctttgggttaggtaaagagcggagtaccgcattgaagcgtattgcaaagcaacagaaagtaacaattaatacgattttacagagtgcgtggggtgttattttacagaaatacaataataatcaggatgtcgtgtttggtagtgtggtatccgggcgtccggcagaagtcgcaggcgtggagagcatgatcggtttgttcattaatacaattccggtacgcatttacagtgagcggaatgcaacatttgctgaaatattaaagcgtacacaggaacaggctttgagctccggtccatatgacacgtttccgctctacgatattcaggcgctaactgaacaaaaacaagacctgattaatcatattatggtctttgaaaactatccgatcgggcaaaagatatctcaggcgattgattccggcgaagcagacgcacatacaggcttatctatagccaatgtggcaattgcagagcaaaccaactacgattttaacctgattgtcgtgcctgacgaggatatcacgatcctgctggaatacaatgaactggtatataaccggtccgaaatgcagcgcatcaagggtcatatcgagcatgtcattaggcaaattgtggagaatccgaatatccgtgtgagtgagttggaattgataacatcggaagaacaagcgcagattattcaggtttggggcgatactgcaacagcttatccacaggatcagacgttaagtgcggtgttcgaggaacaggtggcacagacaccggatcaggtagcattaatgtttggacatcagagtctgacttatcgggagctgaatgaacgagccaactcattggcacgaatacttcaagcacagggggtaggacctgataagctggtcggcctgatggtgcatcgctcagtggaaatgatcgtaggtctgctggccgttctaaaagcaggcggtgcatatgtgccaattgatcccgaatttccgtcatctcgtattcaatacatgctggaagatagcgaggccacagtgcttctgaccagtcgtgatctgttggaagagcaccattgcaacgccaatgcaatatttattgaggatgcagaattgtatcagggagaaagcagcaacctggaggcgattgcccgcccagagcatttggcttacgtcatctatacctctggttcaactggaaatccgaaaggggttatgctccagcatcgctcagtactcaactttattacaggtatgcgcgaagcaattgactttgaaacgagtcaaaccattttgtcactgacgaccatttcattcgatatttttgtcttggaaaccatcctgcctctgctgggtggcatgacggttgtgcttggcgaccgccagcatcaggtgaatcctcaggcacttggtgagttgattactcatcatcatattgagatgttgcaaatgacaccatcgcgggtgcaaatgctactgagtcatgaaacaggttcccacgcactgcaaagcgtgaaggcaattatggtcgggggtgaagctctaccgtccaagctgttgggagatctgcaaaagataaacggtcctcgcatttacaatatgtacggacctacagaaacgacagtttggtcgactgtacaggaactgacccatgctcatcaaattaatatcggacgtcctatcgcgaatacccaaatatatatcatgaacgcggatgggggattgcagccaatcggtgtgccgggcgaattatgtattgcaggggaaggattagcccgtggttattggaaacgcgaagaactaacggccgagaaatttgtagagaacccgtttgccggaggcaaagcaggctatgaacggatgtaccgcaccggcgatttggcgagatggatgccggacggcaacattgaatatctgggccggatcgatcatcaggtgaaaatcaggggttatcggattgagctgggcgaggtcgaatcgcagctgctccaggtggaatcggtacgcgaagcggtcgtcgtggcccgtatggacgaaatgggccaaaaccacatggtggcctactatgtcgcgggacaagaagtcgaggccagcaagctaagaagtgagctgggacgggagttgccaggctacatggtgccatcctactttgtacaactggaacagctgccactgacaccgaatggcaaaatcgaccgcaaggccttgcctgcaccagagggcagcctgcaaaccggagtcgattatgccgagccgcgtacggcgcaagaacgcgctttggtagccgtctgggagtcggtactggggctgcagacggtcggtattctggacaatttcttcgacctgggcggtgattcgatcaaggcgatccaaatcgcctcccgtgcgttccaggccggctataagctggacatgaaggatttgttccagtatccaaccgttgaagccctggcaccgcatatgcaagaggtccgtcgtatggcagatcaggaagaagtcagcggggaaacggcgctacttccgatccagcattggttctttgcgcaggagcgcgagcgtccgcagcactttaatcaagcggttatgctctatcgcgccgagggttttgatgagacagcggttcgccaagccatggatcacctcgtgaagcatcatgatgcgctgcgtacggtattccatcagacttccgctggttatacagcttggactcgccatgtagaggaaggcacgttatatacactggaaactttggattaccgtgaacgggccgcttatgcggaagcgctggaagcgaaggcaatggaaattcaaagcagcatggacctgtccgcaggacccttggtgaaactcggattgttctgcacaaccgagggcgaccatctgctgatcgctattcaccacttggtggtggacggggtgtcgtggcggattctgtttgaagatttctcgacaggctacgagcaggcgatccagggcgagcctgtacgattgccctataaaacagattccttccaaacgtgggcacgggagttatcctcttatgctaaccgtcctgaggctgtatcggatgaagtctattggaagcagctggaacaggtcaaagctgaagctgcaccactgcctaaggattttgcctatgagggctccgtgaatgcagacagcgaagtgctaacggtggagtggactgaagctgaaaccgagcaactgttgaagcaggcccatcgcgcctataacaccgaggtcaatgatttgctgctgaccgcgctgggactcgcggtgcacaactggacaggtgcaggacatgtactggtgaacctggagggccatggtcgggaagcgatcttgccagaggtggatattacacgtacagtaggctggtttacgagcttgtatccagtgctgctggagaccggcaaggaaatgacactggcagagcggattaaagaaacgaaggaaggcttgcggcgcattccgcataaagggctgacctatggcacttggcgttacctgtcctctgcgttgcctgcagatgaaatggatacgatcgcagccgaaccggaaatcagctttaactatttggggcaggtcgatcaggatctgcaaaacagtggaattacgttgtcctcctaccgtgcaggggagacagaggatgcccattcaccgttactgtacacgctggatttgaacgcaatgatctcggaaggcacgctgcgtttgacgatcgcttacagccgtaagcagtatcgtaaagaaacgctggaacgagtggcggggctaatgaaatccgctttgcaggaggtcattacgcattgcgtcgctcaggagcggccagagcttaccccaagtgatgtatccttcaaaggtctgacgactggtgagctggaacagattgcggaacaggcggcacgtatcggtgagctggaaaatgtatacgcactgacgccgatgcagaagggcatgctcttttacaatctgatggattcgcaatcgggagcttattttgaacaggcctcctttgatctgcgaggacattttaatatcgctgcctttgcagccagtttggatgtcttggtgcagcggcatacggtactgcgcacgaacttctacagcggctggaaggatgaaccgcttcaggtcgtgtaccggaataagcgcagcgaactgtatgttgaagatttaagggacatggaggacgagcagcaaaacgaatacatgctcgaatttacgcgtaaagacaagcaaagaggctttgacctggcacaagacgccttgatgcgtgtcgctgtgttgcgcacaggtgaggagacgtatcgttttgtatggagcttccaccatattgtgatggacggctggtgcttgtcgctggtgacaaacgaagtgtttgcaagttattttgcgatactggctcataaacaacctgaactggcccctgtaaccccgtacagtcaatatatcgaatggctagagcagcaggatcgtcaggctgcatcaagctactggagcaaggttttggaagggtatgaggagcagtcccgcttgccacaggcaaaaattcagggtaagacggggtatcaggcggagcgtctggattttgatttgggcgcagagctcacagctggtattcagcgcatagccaagcgttatcaggtcaccatcaatacgttgatgcagaccgtatggggccttttgctgcaaaaatataatggcaccgatgatgtcgtgtttggcagtgtggtatctggacgtccggcagacattccgaatgtggagcatatcattggtctgtttatcaatacgattccggtgcgtatccacagtcaggtggacagcgtattctccgacgtgatgaagcacatccaggagcaatcgatcgattcccatgtgtatgatacgtatccgttgtatgaaattcaggggttgtcggagcttaagcaggatttgatccatcatattcttatttttgaaaattatccggtagaggaacaaatcgagcaattaggtagtagtgaggcgtccagcttcacgatcacaggagccgagtctgtcgagcagaccaactatgactttaacgtggtagtgctgccggggaataccattcacatgagctttggctataatgccctagcctttgaacgggaaagtgtggaacaaattcgaggtcatctggtgcagctactggagcaggtgacagcgaatccgaacattcgcgtacatgaactggacatggttacgatgcaggagcgtaagcaaatcgttgaggtgtggggcaatacagcggcagcctatgcaagcgagcaaacgattcacggcttgttcgaggcgcaaaccgcgcagacgccagagcagacagccttgttctttgaaggagagcagctgacttatcgcgagctgaatgaacgcgccaatcgattagcgcgtaccttgcgcagtcaaggcgtgacgaaagatcgtttggtgggtctgatgaccgagcggtcggtggacatgcttgtgggcatcttcgggattttaaaagccggaggcgcctatgttcctatcgatccaacctatccggaggaacgtatccgctatatgctggatgactcgggagcgaagctgctattgacacaaagtcatctggtggacaaagccgttatcgacggtcaagtgctggtattggatggggaacaatcggtgtaccacgaggatggttccaacctggagccgctgtctggtccaaacgatttggcgtatgtgatctacacgtcaggtacaaccgggcagccgaagggcgtgatgctggagcaccacgggctgtgcaatctgaaaacgtattttgatcagacgctcaagattcgtgcgtcggatcatgcgctgctatttgccagctactcgtttgatgcggcttgctgggaaatcttccaggcgctgttctgcggggctacgttatacgtgccaacaacagagacgattttgaactacgaacggtttgagcaatatatggcggatcaccacattacggtggctgctttgccgccaacttatgcagtgtatttggagccggggcggatgccgcacctgcgtattctgttcactgcgggttcagcctcatccaccgaactggtatacaagtggaaggatcaggtggcgtactacaatggctatggtccaaccgaaaactcggtggcaacatccatctggccggtatccgaggatgaaagggcaggacaactcatttccatcggacgtcctgtgccgaatcaccgggtatacatggtggatgtgcatggacatttggcgccggtcggcgtagcaggtgagctgtgcgtgtccggtccgggtctggcgcgtggttatctggatcgcccagagctgacggcggagaaattcgtagcgaacccgtttgcggcgggtgaagcaggctatgaacgaatgtaccgtacgggggacttggcgagatggatgcctgatggcaacattgaatatttgggccggatcgaccatcaggtgaaaatccggggctaccggatcgaactcggcgaagtcgaggcacaaatgttgaaagtggaaaacgtgcaagaagtcatcgtcctggctcaagcggacgagcagggacaaaaccaactggtggcgtactatgtcgctgaaagagacgtaagcgctggggagctgcgcggcttcctgggtgaggagctgccaaactacatggtgccttcgtatttcatccagctggagcagatgccgctgacaccgaacggcaaaatcgaccgtaaggccctgccggcaccggaaggcagtctgcaaagcggagcggattatgtagagccgcgcacagcgctggagcagacgttggcttcgatttggcagtctgtattaggaacgaagaacatcggtattttagataatttctttgatctgggcggcgattcgatcaaagcaatccaggtatcctcccgcttgctgcaagcgggctacaagctggacatgaaggatttgttccaatatccatccatttcgctgctgagtggtcatgtacacccagttagtcgtacggccgatcagggcgaggtttcgggcagcgtcaagctgaccccgatccagcagtggttttttggactatcgtcggcagagccgcattatttcaaccagtcggtgatgctgcatcgagcagaaggctttgatatagatgcattgcatcgcacggtgacccaggtgacggagcatcatgatgcgttgcgtatggtcttccgtcagaccgaacagggctatgaagcgtggaatcgcggtgtgaacgaaggcgagctgtatcatctggacgttgtagatttgacaggcgtcgaagatacggcagatgtgatgatggcgattgagatgaaagccaatgccatccaaagctctattcatctggatgaaggaccgctggtgaagctgggactcttccgctgcatggatggagatcatttactgattgccattcaccatttggttatagacgggatctcatggcggattgtgtttgaagattttgcgactggatatgaacaggccattcggggagaagcgattcgcttgccttataaaacggattcgttctctgcttgggcagagcggttgtctcaatatgcgaacagtccggccattgacaacgaacgcgaatactggcagcgtcttgctcacatggcagtcgcatcgctacctaaggatcaagacaaagcagcaggacagcctttttgggtcagagatagtgagacggtgaccgtggcttggaacgaacaggaaacccggttgctgcttcaggaatcacatcgtgcgtacaatacggaggtcaatgatctgctgttaaccgcactcggcagcgcattgtacaactggagcggtcaggagcgtgtgctggtcaatctggagggacatggccgggaggctattgttccagatgtggatatcacacgtaccgtgggctggtttacgagtcagtatccggtgctgctggatgtcgatggaaaggcggaagtagggcagcgcatcaagcgggtcaaagaggacctgcgtcatgtgccgcataagggcattggctacggtattttgaagtatatgtcttcggatgatgctacctcttcctggagcctgcagccagagatcagctttaactatttgggacaatttgatcaggatttggaacagagtgacatcgtgctgtcttcgcatacggacggagagccgatgagtggttataccgtgctggagcagccgctgaatgtgaacggcatgattacagcaggcgtgctgacactggaaattcgctatgacagccaagtatatcatcagcaaaacgtagaaaaatttgcgcagttgctacgggaaagcttgcaggaagtaatcaagcattgtgcctcccaagagcggagcgaactaacgccaagcgatgtcttgttcaaaggcttgtcgttggaacaactggagcaattgacggagcaaacggcttctgtgggcgaactggaaaatgtgtatgctctttctcccatgcagaaagggatgctgttccatagcttgatggagccagactcaggcgcatacttccagcaagcatcgtttgatcaaaaaggcagcttcgatgttgctattttccgtcagagcctggatctgctgacacagcgtcatgaagcgctgcggacgaatttctatcggtttgagaccggacatggtcaggagccattgcagattgtattccgtcacaaagatagcgacctttcctacaaggatgtacgcggaatgcggaaagcagaacaacaggcgtatatccaggcgttgaagcaggaggatcaggctcggggctttgatctcggtacggatgcactgatgcgcgtacaggtatggcagaccgatgaagaaacgtatcactgggtctggagcttccatcacattatcatggacggctggtgcttatcgctcgttacgggtgaggtgtttggtacgtactttgcgctgctggagcagaaacagccggagctggctccgatcacaccgtatggccaatatattgaatggctggagcgtcaggatgaacgtgcggcaaaagagtattggagcagctatttggcgggctttgaacagcagacgttgttgccaggatcggatactgcatcgaaagaccacgtgacggacagcagggaacatgcggtatcctcgacagcaagcgaagccagcgaatatgtttctgaaaaagtaacggtagatctggatccaacgtggagcgaagccatgtaccggattgccaagcagcagcaggtcacgattaatacgctgatgcagagcgtgtggggcctgattttgcagaaatataataacaatgaggatgttgtattcggcagtgtcgtatctggacgtccgacggatattgcgggtgtagaaaatatgatcggtctgttcattaatacgatcccggttcggattcaaagtgagcggaatgccacgtttgtggacatcatgcggaacacgcaggagcaagcgttggcttcgggagtatatgacagcttcccgctatatgaaatccaggcgctgaccgagcaaaagcaaaatctgattaatcacattatggtatttgagaattacccggtagaggagcaagtcgagcagttgggtgaagttcgtccgtctgcatttgacattacgaatgtagaggttgttgagcagacgaactatgatctggacttgattgtgatgccggatgacaccttccgcatcatgttcagatacaacgcgaatgtgtacgatcggtctacgatcgagcggatgcagggacatgtactgcatgtcatcgagcaaatcgtgaacaatccgcatatccgtgtgaatgagctggaattggtgacaccagaagaacaggcacagatcattcaggtgtggggagatacggcggcagcctatccacaggatcaaacgctaagcgcactgtttgagcagcaggcagcaattacaccggatcaggcagcggtaatattcgggtcggagatgttgacctaccgtgagctgaacgagcgaaccaaccgtttggctcggacgctgcgtgcggaaggggttgaacccgatcagcctgtaggcattctggtccatcgttcgctggacatgatcgtaggtatctatgcgatcctcaaagcaggcggagcttatgtaccgatcgatccggaatatccggccgaccgcatccgctttatgctggaggattcaggcgcgaagctggtgctgacgcaatcgcatctggcggagcaagcatcacggagtttcgacggtcaggtgctggtgctagatcgtcaggagcaggctggcaagaatatttaccacgaagatggttcaaatctggagcccctggctgggccgcatcatgtcgcctatgtcatctacacctccggttccactggaaaaccgaagggtgtaatggtggagcaccattccgtgttaaaccggattttgtggatgcatgatcgctacggcctgggtgcagaagatacgatcctgcaaaagaccgccttcaccttcgacgtgtcggtgtgggagctgttctggtggtcgatggtcggctcaaaggtaagcctgctgtcggtcggcggggaaaagaacccggaagacatcgtcgacacgattgcccgcgatggcgtgagcacgatgcactttgttccagccatgctgcatgcgttcctggagtatgtggaacagcagccacgagaagtgatgcaagcgaagctgggcacactgcgccatgtctttgccagtggcgaagcattgtcgccacagcatgtggcccggtaccagcggctcgtgtcgagcctggccggagcgaagctggtcaacctgtatggcccaaccgaagcaacggtggacgtatcgtacttcgattgcgagcctgatggagcctattcggttattccgatcgggaaaccgattcaaaacattcgtctgtacatcgtcaaggaaggcacggagcaattgcagccaattggcgtggcaggggaactgtgcatcggcggtgtcggcgtagcacgaggatatctgaaccgtccagagctgacggccgagaaatttgtagctgatccgtttgccggcggggaagcagggtatgagcggatgtaccgtaccggcgatttggcgagatggatgccggacgggaacattgaatatctgggccggatcgaccatcaggtgaaaatccgggggtaccggattgagctgggcgaggtcgaaacgcagttgctccaagtggaatcggtacgcgaagccgtggtcatggctcgtgcggacgaaacgggacaaaaacacatggtggcctactatgttgccgggcaagaaatcagtgccagcgagctgagaagtgcgctggggcaggagctgccaagctacatggtaccatcgtactttgtacagctggagcagatgccactgagtcccaatggcaaaatcgaccgcaaggcactgccagcaccggaaggtagcctgcaaagcggagccgattatgtcccgccgcggacgtgggtggaagtgaagctggcgcaaatttggcaggatgtgctgggcctggcgcaagttggcgtgaaggaaaacttcttcgaaattggcggacattcgctgcgggcgacgacactaacctcgaagattcaccaagagctgaacaagcagcttcctctgcgcagtatttttgaagcaccaacgattgaacaactggcggctgtgctggaaggtctggatcaggtggcgtatgcgtccattccggtaacggaagagcgtagcttctatccactgtcctcggcgcaaaaacgactgtatgtgctgcatcagttcgatccgctggatgtgaactacaacatgccgtcggtgctgcaagtgagcggtccgctggacgtgaaacgagtggaacatatattccgtcaactgatcgcccgccatgcgaccttgcgtactcgctttgagctggtggacaatgagccgatgcaatggatcgaggacaccgtgccattcgaggtggaatatacgaaggtacaggcagaagatgtgattgcggatacagatcaggacacaactacagatacgtacaccagggtcaacatagaggcgcaacagctggtgcggcgctttgtccgtccgtttgatctcaaagctgcaccgctgctgcgagtaggtttggtggatctgggcgttcaaggagtagaacaggaatcccaacatctgcttatgctcgatatgcaccatatcgtctcagatggggtgtccctggaggtcctgactgatgagtttgttcgtttgtatggcggtgaagagctggcgccattgcggattcaatacaaggattatgccgtatggcagcaaagcgaagcccatcaggaatggatgcagcgtcaggaagcgtactggctgagcactttccaaggtgaactgcctgtactggatctctctacggactttgcccgcccagcggtgcagagtacagcaggggatacggtcgaatttgtactggagcgtgaggatagtgaacgcctgaaagaactggctgcccagaccggctctaccctgtttatggtgatgctggcggcgtacaccacactcttgcacaaatacacaggccaagaggacatgattgtcggtacgccaattgccggacgaccgcatgccgaactggagagtttggttggtgtattcattaacacactggcgatgcgcaattatccgtccagcgacaaatcgttcctggattatctgcaggaggtcaaagagcatgcgcttcgtgcgtatgagcatcaggactatccgtttgaagagctggttgaaaaactgaatttaacccgggatacgagccggaatgcgctgttcgacacgatgtttgaattgaaaacgttggagcagcgggagttcgagctgaaagggctgaccttgagctcctatccactggataatcacacagccaaattcgatctgagcttggaggcgatagagcaaccggaaggcattctgtgcagtctggaatacagcacagcgctgtacaagcgggagactatgacgcgattggcagagcattttgcggaaatcgttcgagcgattgcctatcatccgcagcagccactggcagttttgaacatggtaaccgatgaggaacaagagcaactcatctacggttttggagaagtgggcgtaacggatgttgctgcggttggagtaggagccctgttccatacctatgtggaagaacaggcccagcttataccagatcatgtggcggtggtatacgaggagcaacagcttacgtaccggaaactgaacgagcgtgcgaaccaattggcgcgcagactaagaaatgaaggtatcggacgcgagtcgattgtcggcattttgagtgagcgctcggtagacatgctggtcggtgtgttggcggtatggaaggctggaggcgcatatgtgccgctggatgcagactatccgtccgagcgcattcgtttcatgctggaggacagtggtgcgacggtactgttgacccagacgggattgcaggagcgcgcacaagcatggctgaatgaaagccaatggacttggggcgatgaaaaagctaagggtgagctggagacggcggttagcgctgaaacgatggaaagagacaacctgaatgaaggtttgagcttgaaatcagattcgaagtctgacagcgaagcagcatctgaatcggcaacaaagctgcgtctgcaaatcatgctggcattggacgatgagtcactgtacaccggagatacgacagacgttgatcacatcaacgaaccgcaggatctggcgtatgtgatctacacctccggaacaaccggacgtccgaagggcgtcatgattgagcatcgcagtttggtgaatacagctgcggcgtatcgccgggattatcgcctgagcgagttcccagtacgactgctgcaactggcaagcttctccttcgacgtgttcgtcggggatatggcgcggacgctctataacggaggcacgatggtcatctgtccgaaagacgaccgacttgattttagccgtctgcatggctggattcgtgactaccaaatcactgtgttcgaatcgactccagctttgatcgtaccgtttatgcagtatgtgcatgaacaagcactggacatgagcagtctgaagctactcatcacgagctcggacagttgcagcgtaacggactaccgagtgctgcaagaacggtttggtgcaaatatccgtatcatcaacagctatggcgtcacggaagcagcgattgactccagcttctatgacgaagagctgtcgaagctgccaagcagcggccatgtgccgattggtcaggcatggctgaatgcccgcttctacatcgtggacagccagctgaatccggtgccgatcggtgtactgggtgagctgtgcatcggcggagccggggtcgcacggggctacctgaaccgtgcggacctgacggcggaaaaattcgtagcgaacccgtacgtaccgggcgaacgactgtaccgcacaggcgacttggcgcggtggatgccggacggcaatgtagactttatcggccgaatggatgatcaggtcaaaatccggggcttccggattgaactgggcgaggtggaagcgcaactgctgactgtggatggcattgagaaagccatcgtcaccgcctgggaaaacgaaaacggagacaaagatctgtgcgcgtatgtcgtagcctcggaggcgctgaatttgccggagctacgcagcacactccagcccaaactgccgggctatatgatcccgacgtatgtcgtaccactggatcaattcccgctgacaccaaacgggaaaattgaccgcaaagcgttgccagcaccggaagctcgcctcgaaggaggcacggagtatgttgcgccgcggacagagctggaagagcaactggtacgtatttggcaaagcgttctgaatcatcagcgggtaggcatccaggataacttctttgaagtgggaggacattcactgcgtgccaccaccctgatggcgaaaatccatcaggagctgaatcacaagctggccttgcgagatattttccaatatccgacaattgaacaattggtacaggtgatgggtgaagatcagacccagcaaacgtatgtatccatacctgtggcggaggagcgcgactattatcccgtttcctcggcgcaaaaacggatgtacgtgctgagtcacctggaaggtggagaggtgagctacaacatgccgggagctttgattatcgaaggctccttggataaagagcgactggaacaagccttccgccagctgattgcccgtcatgaaaccctgcgaacccgattcgagatggtggatggcgaggtgattcagcggattgaatctaacgtcccattcagcgtggagtatgtgcaagcaagcgaagaagagacaccgcagtacgcacaggactttgtacgtgcctttgatctcgcacaagccccgttgctgcgagttcagttgatcgaaaacggaccggggcgtcacgttatgctctatgacatgcaccatattatttcggatggcgtcacggaaggaattatcgtgcaggagttctctcaattgtacgaaggcaaggagctcccgccactgcgtattcagtacaaggactatgccgtttggcagcatgcagatatgcaaagtgaacgtcttcgtgcgcaagaaagctattggctgaacaccatgtctggtgaaattccggcactggatatgccaacggattttacaagacccgccgtacagcgtctggaaggaactcgatttgagtttgcgatctgcatggaggacagcgagcagttgaagcagctggccgcgcaaaccggatccaccttgtacatggtattgcttgcagcgtatagcacactcttgcataaatacacgggtcaagaggacatcatcgtcggcacgccgattgccggaagaccacatgcggagctcagtagcctagtaggcgtattcctgaacacgctggcgatccgtaattatccgtctggtgacaaaacgttcctggactacttgcaagaggtcaaagagcatgcgctcagtgcgtatgagcaccaggaatatccgtttgaggagctggttgaaaagctgaatgtaacgcgggatacgagccggaatgcgctgtttgatacgatgtttgaattgaaaacatttgagcagcaggagttcgagctggaagggctgacctttaagccgtatccgacggacgttcatacgtccaaatttgatttgaccttggatgctgtagagcagccagaaggcattctgtgcagtctggaatacagcacggcgctgtacaaacctgagaccatcgcgcgctttgcacagcattttactgaactcgtacgagccattacactgcatccaaagcagccactggccgctttggatatggtaactgtcgaggaaaaagcacaaatcctctatggttttggagatgtaggcgtatcagatgttactgcggttgaagcaggagcactgttccatacctacgtggaagaacaggcccagcttgtaccggatcatgtggcggtggtgtacgaggagcaacagcttacgtaccgcacactgaatgaacgtgcaaatcaattggcgcgtagattgcgaaatgaaggtatcggacgcgagtcgattgttggcatttggagtgaacgctcggtaaacatgctggtcggcgtactggcggtgtggaaggctggaggcgcatatgtgccgctggatgcagattatccgtccgaacgcattcgtttcatgctggaggatagcggtgcgacggtgctgctcacgcaaaccagtttgcaggagcgtgcccaggcatggctggagaaaagcgatcaggccttggtcgaagggcagactgagggtgagctggaaacagcggctggcgctgaaacgatggaatcaggtgctcttcatggaaacctaaatggaacagcagattcgaagtctgacagcgaagcagcatccgaatcagcaacagggctgcgtctgcataccgtactggcattggacgatgagtcgctgtataccggggatacgacggatgttgaaccgatcaatgaaccgcacgatctggcgtatgtgatttacacctctggcacaaccggacgtccgaagggcgtcatgattgagcatcgcagcttggtgaatacggctgcagcgtatcgccgggattaccgtctgaaccagttcccggtacgactgctgcaactagccagcttctccttcgacgtgttcgtcggggatattgcacggacgctctataacgggggcacgatggttatttgtccgaaagacgaccgcattgatccaagccgtctgtacggatggattcgcgattatcagattaccgtgttcgaatcgactccagccctgatcgtaccgtttatgcagcatgtgcatgaacagggccttgacatgagcagtctggaactgctgatcaccagctcggacagctgcagcgtgacggattaccgggtgctgcaagaacgatttggtgcgaatatccgcataataaatagctacggcgtcaccgaagcggcgattgactccagcttctatgacgaagaactatcgaagctgccaagcagcggccatgtgccgattggccaggcatggctgaacgcacgcttctacatcgtggacagccagctgaatccggtgccgatcggcgtactgggcgaactgtgcatcggcggcatcggggtcgcacggggctacctgaaccgtgcggacctgacagccgagaaattcgtagcgaacccgtacgtaccgggggaacgtttgtatcgcacaggcgatttggcgcggtggatgccagacggcaatgtggactttatcggccggatggactaccaggtcaaaatccggggataccggattgagctgggcgagattgaaacggcgatccagcgggtgccaggtgtgcgtcaagccgtagtcatcgaccggatggacgagcgtggacacaagtatttgtgtggatacatcacgggagaagccgagctgcggatggaggaagtacagaccgagctggaagccggactgccagcacacatggtgcctgcacgtctgatgcgactggagaccatcccgctgaccagcaacggcaaaatcgaccgcaaggccttgccagagccggaaggcagcatccatacaggagcagcttatgtggccccgcgtacgaaggtggagcaagtactggctgcggtatgggccggagtgctgggcgtggatgccgtaggcacgcaggataacttctttgagctgggcggcgattcgatcaaagccctgcaagtctcgtcccgcttgctgcaagcaggttatcgactggagatgaaagacctgttcagtcatccgacggtgtctgccttggcgctgaaagtccaatcggtgacaagattggcggatcagagcgaagtggtgggcgcggtgaaactgacacctgttcagcattggttctttgagcagaacctgacggatgctcatcatcataaccagtccattatgctgcatagccaggacggttttgatgaagtggccctgcgcacagcgatggaccacatcgttagccatcacgatgcactgcggatcgttttccgccttaccgagcatggatatgaagcttggaaccgcgcaattggcgagggtgagctgtatacgctggaacgtatagacttcagccatgagactgaagtgtctgcggcgatggaggccaaagtaaatgaaattcaggcgggcattcatttaagcgaaggaccactggtgaagctggggctgttccattgcccagatggagaccatttattgatggctattcatcacttagtagtggataccgtatcctggcgcattttgttcgaggatcttacgacagcctatgaacaggcattgcacggacaagcggctcgtcttctgcacaaaacggattcgttccgtacctgggccgaggcacagtctcactatgcgaacggtccagaaatggaagcagagctcgcattctggcaagacgtggaacagggaaggtatgagccgcttccaaaagacgaatcaccttctcattccttgaataaagacagcgagcttatgatggtcacatggacagctcaggaaacggagcagttgttaaaacaggcgcaccgtgcctacaacacggatatgaatgatctgctgctgaccgcacttggcacggctattcatcgctgggcggggattgaacgcgtgcttgtcaccctggaaggccatgggcgggagtccattttgcccgagctggatattacgcgtacggtgggctggtttacgacacagttcccggttgtgttggatatgagcgcagggcaagacctttcacagcacatcaaacaggtgaaagaagggctacgccggattccgcaaaagggcattggctacgggatgctgagatacctgtctgcagcatgtgagcaagcgcattttggaaccgaacctgaaatcagctttaactatctcggacaatttgaccaggatatgcaacatcaatccattggcgtgtctccttacgctagcggtgccgagcttagcgcatatgcagccagatcgcacaccctggatctgaacggactgatttccgaaggtcaattgcaattgacgatcagctacagccatcaggaatatcgcaaggaaacgatggaacagctagccgaagcgctcagaaccagcctgcaggaaatcatcgcgcattgcgcgggtcgcaaacagcaggaactgacgccaagtgatgttatgcttaaacctgtaaccttggccgagctggatcagttggtcgaacggacgcgtgacatcggggaactggaaaatgtatatgccttgacaccgatgcaaaaagggatgttgttccatagtctgatggatgcagaatcaggggcttattttgaacaaacgacctttgatctacacggacgtttccaagcggatattttccaagatagcttgaatcagctggcgcagcggcatgagatctttagagctaatttcattagcggctggcaggatgagcccgtacaggtgattttccgccataaagaggttggttttagatatgaggatttgcgtcatttggaagatcaggaacgcgacgcgtatgtgcaggaatttattcgtaaggacaaggtagctggattcgatttatcccgggatgcgttgatgcgcgtggcgattttgcggacaggtgatgaggattattattttgtatggagctctcatcatattttgatggacggctggtgtgtggcgttggtgacggatgaggtgtttgaggcttattttgcagccgtagagcatagagcactgaagctcgcccctgtgactccatacagtcagtatattgcgtggctggaagctcaagatgtagcagcagccgcttcatattggaaggaatatttgctgggctatgatcagcaaacgtcgattccaaccggcaaagtaggcgcgaaagccgagggtgaacaatttgagcatgtgctgtgcgatctgggccaagacttgaccaaacgtatggaaatggtagccaagcagtatcacgtgaccaccaatacgctcctacaaacggcatggggcttactgcttcaaaagtacaacggtagtaacgacgccgtctttggcggtgtcgtatcgggtcgcccggcagatatttcagggatcgaaaacatggtgggcttgttcattaacaccattccagtacgtatccgtagtaaggctgaggacacctttgccgacctgattagagcgaatcagcagcaggcgctggcttctcaagattacgaaacgtatccgctgtatgaaattcaagccttgaccgagcaaaagcaagagctgatccagcacattatcgtgtttgaaaactatccggtggaggagcaggtcgagcagcttggcgaaggtgcggaatcggattttgtcatcagcaatgcagggatgattgagcaaaccaactatgatttcaatctggtcgtcatgccgcaggaagcgatgaaaatccgattcgaatacaatgcgaagttatatgatcgggaagcggtggaacggacgcagggtcatctggtacagctgctggagcaggtggtagcgcagccggacattcaagtgcaggagttggatgtgttaagcgagcaggaacgcgagcaaattctccacggatggggagatacagccgctgagtatccaagcgaacaaacgatccatggcttgttcgaagcacaagccgtgcagacaccggaacagccagcattgtacttcgaaggagagcagttgacctatcgcgagctgaatgaacgtgcgaatcgtctggctcgtaccttacgcagtcaaggcgtgacgaaggatcgtctggtgggtctgatgaccgagcgttcggtagacatgatcgtgggcatctttggaattttgaaagccggaggcgcatatgtcccaatcgatccaacatatccagaggagcgtatccgctacatgctggatgactcgggagcagagctgttgttgacgcaaagccacttggtggacaaagtagctttcgacggtcaggtgctggtgctgaatggggcggagagtgtgcatcacgaggatggttccaatctggagtcgttgtctggtccgaacgatctagcgtatgtgatttatacgtcaggtacgacgggacagccgaaaggggttatgctggagcatcgcggtctgtgtaatctgaaaacgtattttgatcaggaattccagatcagcgcgtcggatcatacattgctgtttgccagctattcgtttgatgcagcttgctgggaaatattccaagccctgttctgtggtgccacgttgtacatgccaacgtcagagacgattttggactatgagagattcgagcattacatgacagaacatcagattacgatagcgacattaccaccaacctatgcggtctatctggagccagaacggatgccaatcctgcgtattctgatcactgccggttcagccgcttcaacagagctggtatacaagtggaaggatcatgtagcgtactacaacgggtacggtccaactgaaaactcggtggcgacatccatctggccagtatccaaggatgagagagcaggacagctgatttctatcggacgccctgtaccgaatcaccgggtatacatggtggatgtacatggacacttggctccaacaggcgtagcgggtgagctgtgcgtgtccggtccaggtctggctcgcggctatctggatcgtccagagctgacggctgagaaatttgtaccgaattcatttgcggctggcgaagcaggttatgaacgaatgtaccgtacgggtgacttggcaagatggatgccggatggcaacatcgaatatttgggccggatcgaccatcaggtgaaaatccggggttatcggatcgagctgggcgaggtcgaggcacaaattttgaaagtagagagcatacaagaggtcatcgtactggcccaggcggacgagcagggacaaaaccaactggtggcgtactttgttgccgaacgtgacgtgagtgcgggtgagctgcgaagcttactgggtgaggagctaccaaactacatggtgccttcgtacttggtacagctggaacaaatgccgctgacaccgaacggtaaaatcgaccgcaaggccctgccagcaccagaaggcagcctgcaaagcggagccgactatgtcgcaccgcggacgtgggtggaagtgaagctggcgcaaatctggcaggacgtgctgggcctggcgcaggtcggcgtgaaggaaaacttcttcgagattggtggacattccctgcgggcgacgacactggcctcgaagattcacaaagagctgaacaagccacttccactgcgcagtatttttgaagcaccaacgattgagcaactggccgttgcactggaacagctggatcaagtgacgtatgcctctattccggtaacggaagagcgcagcttctatccactgtcctcggcgcaaaagcgactgtatgtgctgcatcagttcgatccgcatgatgtgaactacaacatgccgtcggtgctgcaagtgagcggtccgctggatgtgaagcgggtggaacatgcattccgtcaactgatcgcccgtcatgcatccttgcgtacccgctttgatctgatcgacagtgagccaatgcaatggattgaggacaaggtaccgttcgaggtggaatatacgaagctacaagcagagggtgtgactacggatacagacacgatggccagcaaggaagtgcaggagctggtgagtcgctttgtccgtccgtttgatctcaaagctgcgccgctgctgcgagtaggcttggtggatctgggcgtccagggagtagagcaggaatctcaacatctgcttatgctcgatatgcaccacatcatctcggatggtgtgtcgatgggggtactgactgaagaatttgtccgcttgtacgacggtggagagctcccgccactgcggatacagtacaaggattatgccgtatggcagcaaagcgaagcccatcaggaatggatgcagcgtcaggaagcctactggctcgataccttccggggtgaactgcctgtgctggatctaccgacagactttgcccgtccggcggtgcgaagtacagcaggcgataccgtggtgtttgggctggaacgcgaagtaagcgagcgtctgaaagaactggctgcgcacaccggctctacgctgtatatggtgttgctggcggcgtataccgccctcttgcaccaatacagcggccaggaggacatcgtcgtcggcacgccgattgccggacgaccgcatgcggatttggagccgatcctcggtatgttcgtcggtacgttggcattgcgaaactatccgacagcagaacataccttccgcagctacgtggaagaagtgaaggttcgcgccctgcaagcctatgagcatcaggactatccatttgaggagctggtcgaaaagctgaatgtgaagcgggatatgagccgccatccgctattcgatacgatgtttaccctgcaaacgaccgaggagggcgaactgcaactggcagacctgagcttccgtccgtacggcctggaacaaacgccagcgaagtttgatctgacgctggaagccagagaggaagaggcaggcatccagttcggattgcagtatgcaaccgcgttgtatcaacgggaaaccgttgaacggatgacacgtcactttattcgcttagccgaagccgtggcagcgaacccggatgcgaagctgggtgagctggagctcattacgacagaagaaaccgaacggattctgaaggtgttcaatgatccgaacgcacatagcgtgcgtggaacactccaaggcctgtcgctcagcgagcgttttgaagagcaagcgaaaaacagccctgagcggatagccgttgtgtctggggacatggcgctaacctacgctgagctgaatgagcaggtgaaccgattggcccgggtgttacgggcaaaaggagttgaagcagaccaaccggtaggcgtactgctggaacgttctgcggatcttctggtgagcattctgggggtactgaaggccgggggcgcgtatgtgccaatggatacgatgtatccgcaggagcgcattgattacatgcttcaagatagcggagcaacagtcgtgatcacccgcagagccgccaacctttcgctgagcttgccatccacagtacaagctatcgttcttgacgatgaggacgttcaagctcaactgggagcacaggatgcaaacaacctgatccctgtcgccggcctgcataacctggcctatatgatctacacgtcaggtacaaccggtcagccgaaaggggttatgattgagcaaggcagtgtcggcaatctggtagacgctttatatgagcgagtgtacagccggtatgatcagccgcttcacatcgcatggctgtccgcatttgtatttgacgcttcagtgaagcaaatctttgccagcttgctgctaggccacaccctgcatgtggtgtcccgtgacgtcagcctgagcggagagcatttgatcgcctactatcgcacgcaccgaatcgatctgtcggacggcacaccagcgcatctgcatattttgaacgaaagcgtcaatgtgacagaagcgccggatgtgaagcattacctgatcgggggcgaggccttatccgtgcagctggtacaggggttcctacacaaatggtccggatatcgcccggtcattacgaacgtgtatggtccgaccgaagcgacggtagatgcaacagcctatacgattgaagatgtagagtcactgaatgtactgctggaaaaaggggagcatacggtatccattggaacgccgatagcgaaccaggctgtgtacatcttgaacactcgacaacagctggtaccgatcgggatcgcgggtgagctctatatcggaggggcaggtatcgcacgaggatacctcaacctgccggaactgacggctgagaagtttgttccgaatccgtttgctgatgcgacagccgctgatccggcggacagcagttacgcaaaccggatgtaccggacaggcgacctggcacggtggctgccggatggcagtatcgagtatttgggccggatcgaccaccaggtgaaaatccgcggctaccggatcgagctgggcgaggtggaagcacagctgctgaccgtggacggtatccaaaaagccgtggttacggcatgggaaaacgaagacggacacaaggatctgtgtgcctatatcgtagcttcggagtcgctgagtctaccggaactgcggaatgcgctgcagccgaagctgccggattacatgatcccgacgtatgtggtacagctggatcgtttcccactgacgccaaacgggaaaatcgaccggaaggcgttgccagcaccggaagcacgccttgaaggaggtctggagtacgttgcgccgcggacgccgctggaggccaagttagcgcaaatctggcaggatgtattgaagctgtccagcgtaggcgtcaccgactcattcttcgatgtgggtggacactccctgcgggcaacgacgctggtggctaaaatccatcaggaactggacagtcggattacactgcgtgaggtgttccagcactttacgattgagcagcaagctcagctcatcgcaacgcacgggacagacacctatacggtgatccctgctgcgacgaaacagtcttactatcctgtctcctcggcgcaaaaacgactgtatattttgagccatctggaaggtggggatctcagctacaatatgccgggtgtattaacagtggagggaccgcttcaggcagatcgactggaggaagcgttccgtcagttagtagcccgtcatgaaacgctgcgaacttcctttgaaatggtggacggcgaggttgttcagcggatttacgatcaagtggagtttgtcgtagaacgcctgcaggccagtgaatccgaagcggaagtgtatatcgagtcctttgtacgcagcttcgatcttcggcaggcaccgctgctgcgtgtccgtcttattcaaaccggacccgagcgccatctcctgatgtacgacatgcaccatattatttcagacggggtatcgtctaacaatatcgtgcaggagctaggacaactgtacgagggacaggccttgaagccgctgccaattcagtacaaggactatgcggtgtggcagcagcaggaaatgcagcgtgagtcctaccagcgccgggaacagttctggctggagcatttagccggggaattaccggtgctggatttgccgattgcttatcctagacctgctgttcgcagcttcgagggagcaatgtatgagtttaccgtggacccgaatgtatctgagcaattgcaccaagtggcagcacagaccggaagtacgctgtacatggtgctgatgagcgcctacaccgttctgttgtccaaatatagcggtcaggatgatttgatcatcggtacgccggtagcaggtcgtttgttacctgaactggagccgctgatcggcatgttcgtcaatacactagccatccggcaccagccgcagggcaactcaacgttccataactacctactggaagcccgagatcgtacgctgcaagccttcgagcatcaggattatccgctggaagagctggtggaaaagctggatatagtacgggatgcaagccgtaatccgttgtttgatactatgtttgtactgcaaaatacggagtcgcaggaagcgaagcttgaaacgttgtccttcagtccttatgtgcaggagcatcgtatttccaaatttgatttgaccttgtccatgagtgatgaagacgggcagatcaagggttcctttgaatattgcacgaagctgtttagcgcagatgttattgaacgattaaccggagatttgatagcgatcctgtcacaggttgcggccaatccagatttgcaattaagcgatattcaggtgaacttcggtgaacaagcagaaggcttctcaccggattccatcgactttgttttctag

SEQ ID NO: 413 - DNA, 19908 bp, Paenibacillus polymyxa
  source 1..19908: mol_type = genomic DNA
  misc_feature 1..19908: note = strain LU17007 mutant with genomic deletion
acggccgagaaatttgtagagaacccgtttgccggaggcaaagcaggctatgaacggatgtaccgcaccggcgatttggcgagatggatgccggacggcaacattgaatatctgggccggatcgatcatcaggtgaaaatcaggggttatcggattgagctgggcgaggtcgaatcgcagctgctccaggtggaatcggtacgcgaagcggtcgtcgtggcccgtatggacgaaatgggccaaaaccacatggtggcctactatgtcgcgggacaagaagtcgaggccagcaagctaagaagtgagctgggacgggagttgccaggctacatggtgccatcctactttgtacaactggaacagctgccactgacaccgaatggcaaaatcgaccgcaaggccttgcctgcaccagagggcagcctgcaaaccggagtcgattatgccgagccgcgtacggcgcaagaacgcgctttggtagccgtctgggagtcggtactggggctgcagacggtcggtattctggacaatttcttcgacctgggcggtgattcgatcaaggcgatccaaatcgcctcccgtgcgttccaggccggctataagctggacatgaaggatttgttccagtatccaaccgttgaagccctggcaccgcatatgcaagaggtccgtcgtatggcagatcaggaagaagtcagcggggaaacggcgctacttccgatccagcattggttctttgcgcaggagcgcgagcgtccgcagcactttaatcaagcggttatgctctatcgcgccgagggttttgatgagacagcggttcgccaagccatggatcacctcgtgaagcatcatgatgcgctgcgtacggtattccatcagacttccgctggttatacagcttggactcgccatgtagaggaaggcacgttatatacactggaaactttggattaccgtgaacgggccgcttatgcggaagcgctggaagcgaaggcaatggaaattcaaagcagcatggacctgtccgcaggacccttggtgaaactcggattgttctgcacaaccgagggcgaccatctgctgatcgctattcaccacttggtggtggacggggtgtcgtggcggattctgtttgaagatttctcgacaggctacgagcaggcgatccagggcgagcctgtacgattgccctataaaacagattccttccaaacgtgggcacgggagttatcctcttatgctaaccgtcctgaggctgtatcggatgaagtctattggaagcagctggaacaggtcaaagctgaagctgcaccactgcctaaggattttgcctatgagggctccgtgaatgcagacagcgaagtgctaacggtggagtggactgaagctgaaaccgagcaactgttgaagcaggcccatcgcgcctataacaccgaggtcaatgatttgctgctgaccgcgctgggactcgcggtgcacaactggacaggtgcaggacatgtactggtgaacctggagggccatggtcgggaagcgatcttgccagaggtggatattacacgtacagtaggctggtttacgagcttgtatccagtgctgctggagaccggcaaggaaatgacactggcagagcggattaaagaaacgaaggaaggcttgcggcgcattccgcataaagggctgacctatggcacttggcgttacctgtcctctgcgttgcctgcagatgaaatggatacgatcgcagccgaaccggaaatcagctttaactatttggggcaggtcgatcaggatctgcaaaacagtggaattacgttgtcctcctaccgtgcaggggagacagaggatgcccattcaccgttactgtacacgctggatttgaacgcaatgatctcggaaggcacgctgcgtttgacgatcgcttacagccgtaagcagtatcgtaaagaaacgctggaacgagtggcggggctaatgaaatccgctttgcaggaggtcattacgcattgcgtcgctcaggagcggccagagcttaccccaagtgatgtatccttcaaaggtctgacgactggtgagctggaacagattgcggaacaggcggcacgtatcggtgagctggaaaatgtatacgcactgacgccgatgcagaagggcatgctcttttacaatctgatggattcgcaatcgggagcttattttgaacaggcctcctttgatctgcgaggacattttaatatcgctgcctttgcagccagtttggatgtcttggtgcagcggcatacggtactgcgcacgaacttctacagcggctggaaggatgaaccgcttcaggtcgtgtaccggaataagcgcagcgaactgtatgttgaagatttaagggacatggaggacgagcagcaaaacgaatacatgctcgaatttacgcgtaaagacaagcaaagaggctttgacctggcacaagacgccttgatgcgtgtcgctgtgttgcgcacaggtgaggagacgtatcgttttgtatggagcttccaccatattgtgatggacggctggtgcttgtcgctggtgacaaacgaagtgtttgcaagttattttgcgatactggctcataaacaacctgaactggcccctgtaaccccgtacagtcaatatatcgaatggctagagcagcaggatcgtcaggctgcatcaagctactggagcaaggttttggaagggtatgaggagcagtcccgcttgccacaggcaaaaattcagggtaagacggggtatcaggcggagcgtctggattttgatttgggcgcagagctcacagctggtattcagcgcatagccaagcgttatcaggtcaccatcaatacgttgatgcagaccgtatggggccttttgctgcaaaaatataatggcaccgatgatgtcgtgtttggcagtgtggtatctggacgtccggcagacattccgaatgtggagcatatcattggtctgtttatcaatacgattccggtgcgtatccacagtcaggtggacagcgtattctccgacgtgatgaagcacatccaggagcaatcgatcgattcccatgtgtatgatacgtatccgttgtatgaaattcaggggttgtcggagcttaagcaggatttgatccatcatattcttatttttgaaaattatccggtagaggaacaaatcgagcaattaggtagtagtgaggcgtccagcttcacgatcacaggagccgagtctgtcgagcagaccaactatgactttaacgtggtagtgctgccggggaataccattcacatgagctttggctataatgccctagcctttgaacgggaaagtgtggaacaaattcgaggtcatctggtgcagctactggagcaggtgacagcgaatccgaacattcgcgtacatgaactggacatggttacgatgcaggagcgtaagcaaatcgttgaggtgtggggcaatacagcggcagcctatgcaagcgagcaaacgattcacggcttgttcgaggcgcaaaccgcgcagacgccagagcagacagccttgttctttgaaggagagcagctgacttatcgcgagctgaatgaacgcgccaatcgattagcgcgtaccttgcgcagtcaaggcgtgacgaaagatcgtttggtgggtctgatgaccgagcggtcggtggacatgcttgtgggcatcttcgggattttaaaagccggaggcgcctatgttcctatcgatccaacctatccggaggaacgtatccgctatatgctggatgactcgggagcgaagctgctattgacacaaagtcatctggtggacaaagccgttatcgacggtcaagtgctggtattggatggggaacaatcggtgtaccacgaggatggttccaacctggagccgctgtctggtccaaacgatttggcgtatgtgatctacacgtcaggtacaaccgggcagccgaagggcgtgatgctggagcaccacgggctgtgcaatctgaaaacgtattttgatcagacgctcaagattcgtgcgtcggatcatgcgctgctatttgccagctactcgtttgatgcggcttgctgggaaatcttccaggcgctgttctgcggggctacgttatacgtgccaacaacagagacgattttgaactacgaacggtttgagcaatatatggcggatcaccacattacggtggctgctttgccgccaacttatgcagtgtatttggagccggggcggatgccgcacctgcgtattctgttcactgcgggttcagcctcatccaccgaactggtatacaagtggaaggatcaggtggcgtactacaatggctatggtccaaccgaaaactcggtggcaacatccatctggccggtatccgaggatgaaagggcaggacaactcatttccatcggacgtcctgtgccgaatcaccgggtatacatggtggatgtccatggacatttggcgccggtcggcgtagcaggtgagctgtgcgtgtccggtccgggtctggcgcgtggttatctggatcgcccagagctgacggcggagaaattcgtagcgaacccgtttgcggcgggtgaagcaggctatgaacgaatgtaccgtacgggggacttggcgagatggatgcctgatggcaacattgaatatttgggccggatcgaccatcaggtgaaaatccggggctaccggatcgaactcggcgaagtcgaggcacaaatgttgaaagtggaaaacgtgcaagaagtcatcgtcctggctcaagcggatgagcagggacaaaaccaactggtggcgtactatgtcgctgaaagagacgtaagcgctggggagctgcgcggcttcctgggtgaggagctgccaaactacatggtgccttcgtatttcatccagctggagcagatgccgctgacaccgaacggcaaaatcgaccgtaaggccctgccggcaccggaaggcagtctgcaaagcggagcggattatgtagagccgcgcacagcgctggagcagacgttggcttcgatttggcagtctgtattaggaacgaagaacatcggtattttggataatttctttgatctgggcggcgattcgatcaaagcaatccaggtatcctcccgcttgctgcaagcgggctacaagctggacatgaaggatttgttccaatatccgtccatttcgctgctgagtggtcatgtacacccagtcagccgtacggccgatcagggcgaggtttcgggcagcgtcaagctgaccccgatccagcagtggttctttggactatcgtcggcagagccgcactattttaaccagtcggtaatgctgcatcgagcagaaggctttgatatagatgcattgcatcgcacggtgacccaggtgacggagcatcatgatgcgctgcgtatggtcttccgtcagaccgaacagggctatgaggcgtggaatcgcggtgtgaacgaaggcgagctgtatcatctggacgttgtagatttgacaggcgtcgaagatacggcagatgtgatgatggcgattgagatgaaagccaatgccatccaaagctccattcatctggatgaaggaccgctggtgaagctgggacttttccgctgcatggatggagatcatttactgattgccattcaccatttggttatagacgggatctcatggcggattgtgtttgaagattttgcgactggatatgagcaggccgttcggggagaagcgattcgcttgccttataaaacggattcgttctctgcttgggcagagcggttgtctcaatatgcgaatagtccagccattgacaacgaacgcgaatactggcagcgtcttgcccacatagaagttgcatcgctacctaaggatcaagacaaagcagcaggacagcctttttgggtcagagatagtgagacggtgaccgtggcttggaacgaacaggaaacccggttgctgcttcaggaatcacatcgtgcgtacaatacggaggtcaatgatctgctgttaaccgcactcggcagcgcattgtacaactggagcggtcaggagcgtgtgctggtcaatctggagggacatggccgggaagctattgttccagatatggatattacacgtaccgtgggctggtttacgagtcagtatccggtgctgctggatgtcgatggaaaggcagagattgggcagcgcatcaagcgggtcaaagaggacctgcgtcatgtgccgcataagggcattggctacggtattttgaagtatatgtcttcggatgatgctacctcttcctggagcctgcagccagagatcagctttaactatttgggacaatttgatcaggatttggaacaaagcgatatcgtgctgtcttcgcatacggacggagagccgatgagtggttataccgtgctggagcagccgctgaatgtgaacggcatgattacagcaggcgtgctgacactggaaattcgctatgacagacaagtatatcatcagcaaaacgtagaaaaatttgcgcagttgctacgggaaagcttgcaggaagtaatcaagcattgtgcctcccaagagcggagcgaactaacgccaagcgatgtcttgttcaaaggcttgtcgttggaacaactggagcaattgacggagcaaacggcttctgtgggcgaactggaaaatgtgtatgctctttctcccatgcagaaagggatgctgttccatagcttgatggagccagactcaggcgcatacttccagcaagcatcgtttgatcaaaaaggcagcttcgatgttgctgttttccgcaagagcctagatctgctgacacagcgtcatgaagcgctgcggacgaatttctatcggtttgagaccggacatggtcaggagccattgcagattgtattccgtcacaaagatagtgacctttcctacaaggatgtacgcggaatgcagaaagcagaacaacaggcgtatatccaggcgttgaagcaggaggatcaggctcggggctttgatctcggtacggatgcactgatgcgcgtacaggtagtgcagaccgatgaagaaacgtatcactgggtctggagcttccatcacattatcatggacggctggtgcttatcgctcgttaccggggaagtgtttggtacgtactttgcgctgctggagcagaaacagccggagcttgctccaatcacaccgtatggtcaatatattgaatggctggagcgtcaggatgaacgtgcggcaaaagagtattggagcaactatttggcaggctttgaacagcagacgttgctgcctggatcggatactgcatcgaaagatcaagtggcagacagcagagataacactgtatccactacagcaagtacaaccagcgaatatgtttgcgaaaaaataacggtggagctggatccaacatggagcgaagccatgtaccggattgccaagcagcagcaggtcacgattaatacactgatgcagagcgtgtggggcctgattttgcagcaatataacaacaatgaggatgttgtattcggcagtgtcgtatctggacgtccgacggatattgcgggtgtagaaaatatgatcggtttgttcattaataccatcccggttcggattcaaagtgaacggaatgccacgtttgtcgacatcatgcggaacacgcaggagaaagcgctggcttcgggggtatatgacagcttcccgctgtatgaaattcaggcgctgaccgagcagaagcagcatctgattaatcacattatggtatttgagaactatccggtcgaggagcaagtcgagcagttgggcgaagttcgtccatccgcgtttgacattacgaatgtagaggttgttgagcagacgaactatgatctggacttgattgtgatgccggatgaaaccttccgtatcatgttcagatacaacgcaaatgtgtacgaccggtctacgatcgagcggatgcagggacatgtactgcatgtcattgagcaaatcgtgaacaatccgcatatccgtgtgaatgagctggaattggtgacaccagaagaacaggcacagatcgttcagatatggggagatacagcggcagcctatccgcaggatcagacgctaagcagtctgtttgagcagcaggtcgcgaacacgccggagcaagtggcagtgctgtgcggagcagaatcgttaacctacgctgagctgaacgagcgagccaatcgtttggcccggacgctacgtgcggaaggggtggaacccgatcagccggtgggcattctgcttcaccgttcgctggacatgatcgtaggtatctacgcgatcctcaaggcaggcggagcttatgtaccgatcgatccggaatatccggccgaccgcatccgctttatgctggaggattcaggcgcgaagctggtgctgacgcaatcgcatctggcggagcaagcatcgctgagtttcgacggccgggtgctggtgctggaccgtgaggacatctatcacgaagatggctcgaatctggagcccttggccggaccgcaccatgtggcctatgtgatctatacctccggttccaccggaaaaccgaagggtgtaatggtggagcaccattccgtgctaaaccggattttgtggatgcatgatcggtacggcttgggtgcggaaaatacgattctgcaaaagaccgccttcaccttcgacgtgtcggtgtgggagctgttctggtggtcgatggtcggctcaaaggtaagcctgctgtcggtcggcggggaaaagaacccggaagacatcgtcgacacgattgcccgcgatggcgtgactacgatgcactttgtaccagcaatgctgcatgcgttcctggagtatgtggaacagcagccacgagaagtgatgcaagcgaagctgggcacactgcgccatgtctttgccagtggtgaagcgttgccgccacagcatgtggcccggttccagcggctcgtgtcgagcctggccggagcgaagctggtcaatctgtatggcccaaccgaagcgacggtggacgtatcgtacttcgattgcgagcctgatggagcctattcggttattcctatcgggaaaccgattcaaaacattcgtctgtacatcgtcaaggaaggcacggagcaattgcagccaattggcgtggcaggggaactgtgcatcggcggtgtcggcgtagcccgcggttacctgaaccgtccggagctgacggccgagaaatttgtgaaagatccgtttgccggcggggaagcagggtatgagcgaatgtaccgcaccggcgatttggcgagatggatgccggacgggaacattgaatatctgggccggatcgaccatcaggtgaaaatccgggggtaccggattgagctgggcgaggtcgaaacgcagttgctccaagtggaatcggtacgcgaagccgtggtcatggctcgtgcagatgaaacgggacaaaaacacatggtggcctactatgttgccgggcaagaaatcagtgccagcgagctgagaagtgcgctggggcaggagctgccaagctacatggtaccatcgtactttgtacagctggagcagatgccactgagtcccaatggcaaaatcgaccgcaaggcactgccagcaccggaaggtagcctgcaaagcggagccgattatgtcccgccgcggacgtgggtggaagtgaagctggcgcaaatttggcaagatgtgctgggcctggcgcaagttggcgtgaaggaaaacttcttcgagattggcggacattcgctgcgggcgacgacactaacctcgaagattcaccaagagctgaacaagcagcttcctctgcgcagtatttttgaagcaccaacgattgaacaactggcggctgtgctggaaggtctggatcaggtggcgtatgcgtccattccggtaacggaagagcgtagcttctatccactgtcctcggcgcaaaaacgactgtatgtgctgcatcagttcgatccgctggatgtgaactacaacatgccgtcggtgctgcaagtgagcggtccgctggacgtgaaacgagtggaacatatattccgtcaactgatcgcccgccatgcgaccttgcgtactcgctttgagctggtggacaatgagccgatgcaatggatcgaggacaccgtgccattcgaggtggaatatacgaaggtacaggcagaagatgtgattgcggatacagatcaggacacaactacagatacgtacaccagggtcaacatagaggcgcaacagctggtgcggcgctttgtccgtccgtttgatctcaaagctgcaccgctgctgcgagtaggtttggtggatctgggcgttcaaggagtagaacaggaatcccaacatctgcttatgctcgatatgcaccatatcgtctcagatggggtgtccctggaggtcctgactgatgagtttgttcgtttgtatggcggtgaagagctggcgccattgcggattcaatacaaggattatgccgtatggcagcaaagcgaagcccatcaggaatggatgcagcgtcaggaagcgtactggctgagcactttccaaggtgaactgcctgtgctggatctctctacggactttgcccgcccagcggtacagagtacggcaggggatacgatcgaatttgtactggagcgtgaggttagtgaacgcctgaaagaactggctgcccagaccggctctaccctgtatatggtgatgctggcggcgtacaccacactcttgcacaaatacacaggccaagaggacattgtagtcggtacgccgattgcaggacgaccgcatgcggagctcagtaatctagtcggtgtcttcattaacacgctggcgattcgcaattatccatccggcgatacatcgttccttgagtatctgcaagaggtcaaggagcaggcacttaatgcttatgagcatcaggattatccttttgaagagctggttgaaaaactgaatttaacccgggatacgagccggaatgcgctgttcgacacgatgtttgaattgaaaacatgggagcagcgggagttcgagctggaagggctgaccttgagctcctatccactggacaatcaaacggcaaaattcgatctgagcttggaggcgatagagcagccggaaggcattctgtgcagtctggaatacagcacagtgctgtacaagcgggagaccatgacgcgattggcacagcattttgcggaaatcgttcgagcgattgcctatcatccgcagcagccactggcagttttgaatatggtaaccgatgaggaacaagagcaactcatctacggttttggagaagtgggcgtatcggatgttgctgttgaagcaggagccctgttccatacctatgtggaaaaacaggcacagcttataccagatcaagtggcggtggtatacgaggggcaacagcttacgtaccggaaactgaacgagcgtgcgaaccaattggcgcgcagactaagaaatgaaggtatcggacgcgagtcgattgtcggcattttgagtgagcgctcggtagacatgctggtcggtgtgttggcggtatggaaggctggaggcgcatatgtgccgctggatgcggattatccgtccgaacgcattcgtttcatgctggaggacagcggtgcgacggtgctgttgacccagacgggattgcaggagcgcgcacaagcatggctgaatgaaagccaatggactttgggcgatgaaaaagctaagggtgagctggagacggcggttagcgctgaaacgatggaaagagacaacctgaatgaaggtttgagcttgaaatcagattcgaagtctgacagcgaagcagcatctgaatcggcaacaaagctgcgtctgcaaatcatgctggcattggacgatgagtcactgtacaccggagatacgacagacgttgatcacatcaatgaacctcaagatctggcgtatgtgatctacacctccggaacaaccggacgtccgaagggtgttatgatcgagcatcgctgcttggtgaatacggctgcggcgtatcgccgggattatcgcctgagcgagttcccagtccgactgctgcaactggccagcttctccttcgacgtgttcgtcggggatatggcgcggacgctctataacggcggcacgatggtcatttgtccgaaagacgaccgacttgattttagccgtctgcacggttggattcgtgattatcaaattaccgtgttcgaatcgactccggccctgatcgtaccgtttatgcagcatgtgcatgaacaggggctggacatgagcagcatggaactgctgatcactagctcggatagctgcagcgtgacggattaccgggtgctgcaagaacggtttggcgcagatatccgcatcatgaacagctatggcgtcacggaagcggcgattgactccagcttctatgatgaagaactgtcgaagctgccaagcagcggccatgtgccgattggtcaggcatggctgaatgcccgcttctacatcgtggacagccagctgaatccggtgccgatcggtgtactgggcgaactgtgcatcggcggcatcggggtcgcacgggggtacctaaaccgtgcggacctgacggccgagaagttcgtagcgaacccgtacgtaccgggcgaacgactgtaccgcacaggcgatttggcgcggtggatgccggacggcaatgtagactttatcggccgaatggatgatcaggtcaaaatccggggcttccggattgaactgggcgaggtggaagcgcagctgctgactgtggatggcattgagaaagccatcgtcaccgcctgggaaaacgaaaacggagacaaagatctgtgcgcgtatgtcgtagcctcggaggcgctgaatttgccggagctgcgcagcatactccagcccaaactgccgggctatatgatcccgacgtatgtcgtaccactggatcaattcccgctgacaccaaacggaaaaattgaccgcaaagcgttgccagcaccggaagcgcgcctcgaaggaggcacggagtatgttgcgccgcggacaccgctggaagagcaactggtacgtatttggcaaagcgttctgaatcatcagcgggtaggcatccaggataacttctttgaagtgggaggacattctctgcgcgctacaacactgatggcgaaaatccatcaggagctgaatcacaagctggccttgcgagatattttccaatatccgacgattgagcaattggtacaggtgatgggtgaagatcagacccagcaaatgtatgtatccatacctgtggcggaggagcgcgaatattatcccgtttcctcggcgcaaaaacggatgtacgtgctgagtcatctggaaggcggagaggtgagctacaacatgccaggagctttgattatcgaaggctccttggataaaaagcgactggaacaagccttccgccagctgattgcccgtcacgaaaccttgcgaacccgattcgagatggtggatggcgaggtgattcagcggattgaatctaacgtcccattcagcgtggagtatgtgcaagcaagcgaagaagagacaccgcagtacgcacaggactttgtacgtgcctttgatctcgcacaagccccgttgctgcgggttcagttgatcgaaaacggaccggggcgtcacgttatgctctatgacatgcaccatattatttcggatggcgtgacagaaggaattatcgtgcaggagttctctcaattgtatgaaggcaaggaactgccgcccctgcggatacagtacaaggactatgcggtttggcagcatgcagatatgcaaagtgaacgtcttcgtgcgcaagaaagctattggctgaacaccatgtctggtgaaattccggcactggatatgccaacggattttacaagacccgccgtacagcgtctggaaggaactcgatttgagtttgcgatctgcatggaggacagcgagcagttgaagcagctggccgcgcaaaccggatccaccttgtacatggtattgcttgcagcgtatagcacactcttgcataaatacacgggtcaagaggacatcatcgtcggcacgccgattgccggaagaccacatgcggagctgggtagcctagtaggcgtattcctgaacacactggcgattcgcaattatccgtctggtgataaaacgttcttggactacttgcaagaggtcaaagagcatgcgctcagtgcgtatgagcaccaggaatatccgtttgaggagctggttgaaaagctgaatgtaacgcgggatacgagccggaatgcgctgtttgatacgatgtttgagctgaaaacatttgagcagcaggagttcgagctggaagggctgaccttcaagccgtatccgacggacgatcatacgtccaaatttgatctgaccttggatgccgtagagcagtcagaaggcattctgtgcagtctggaatacagcacggcgctgtacaagcctgagaccatcgcgcgctttgcacagcattttactgaactcgtacgagccattacacttcacccacagcagtcactgtccgctttggatatggtaactgtcgaggaaaaagcacaaatcatctatggttttggagatgtaggcgtatcggatgttgctacagttgaagcagaagccttattccatgtctttgtggaagaacaggcccagcttgtaccagatcatgtggcggtggtgtacgaagagcaacaacttacgtaccgcacactgaatgaacgttcgaaccaactcgctcgcagactgcgaaatgaaggtatcggacgcgaatcgattgtcggcatttggagtgaacgctcggtaaacatgctggtcggcgtactggcggtgtggaaggctggaggcgcatatgtgccgctggatgcagactatccgtccgagcgcattcgtttcatgctggaggatagcggtgcgacggtgctgctcacgcaaaccagtttgcaggagcgtgcccaggcatggctggagaaaagcgatcaggccttggtcgaagggcagactgagggtgagctggaaacagcggctggcgctgaaacgatggaatcaggtgctcttcatggaaacctaaatggaacagcagattcgaagtctgacagcgaagcagcatccgaatcggcaacagggctgcgtctgcataccgtactggcattggacgatgagtcactgtacaccggtgatacgacagacgttgaacctatcaatgaaccgcacgatctggcgtatgtgatttacacctctggcacaaccggacgtccgaagggcgtcatgattgagcatcgcagcctggtaaatacggctgcggcgtatcgccgggattaccgtctgaaccagttcccggtacgactgctgcaactggccagcttctccttcgacgtgttcgtcggtgatattgcacggacgctctataacgggggcacgatggtcatctgtccaaaagatgaccggattgatccaagccgtctgtacggatggattcgcgattaccagattaccgtgttcgaatcgaccccggccctgatcgtaccgtttatgcagcatgtgcatgaacaggggctggacatgagcagtctggaactgctgatcaccagctcggatagctgcagcgtgacggattaccgggtgctgcaagaacggtttggtgcgaatatccgcatcatgaacagctacggcgtcaccgaagcggcaattgactccagcttctacgacgaagaactgtcgaagctgccaagcagtggccatgtgccgattggtcaggcgtggctgaacgcacgcttctacattgtggacagtcagctgaatccggtgccgatcggcgtactgggcgaactgtgcatcggcggcatcggggtcgcacgagggtacctgaaccgtgcggatctgacagccgagaagtttgtagcgaacccgtacgtaccaggtgaacgactgtaccgcacaggtgacttggcgcggtggatgccggacggcaatgtagactttatcggccggatggactatcaagtcaaaatccggggctaccggatcgagctgggcgagattgaaacggcgatccagcgggtgccgggtgtgcgtcaagccgtggtcatcgatcggacagacgagcgtggacacaagtatttgtgtggatacattacgggagaaacagaggagctgcggatcgaggaaatacaggcagccctggaagcaggactccccgcgcacatggtgcctgcacgcttgatgcgtctggaggccattccgctgaccagcaacggcaaaatcgaccgcaaggccttgccagagccggaaggcagcatccatacgggagcagcctatgtggccccgcgtaccaaggtggagcaagtactggctgcggtatgggccggagtgctgagcgtggaagccgtaggcacgcaggataacttcttcgagctgggcggcgattcgatcaaggctctgcaagtctcgtctcgcttgctgcaagcaggttatcgactggagatgaaagacctgttcagtcatccgacggtgtctgccttggcgctgaaagtccaatcggttacccgattggcggatcaaagcgaagtggtgggcactgtgaagctgacacctgttcagcattggttctttgagcaaaacctgacggatgctcatcatcataaccaatccattatgctgcatagcaaggacggttttaatgtagcggcgctgcgtacagcgatggatcaaatggttagtcatcatgatgcactgcggatcgttttccgccttaccgagcacgggtatgaagcttggaaccgcgcggtgggtgagggcgagctgtatacgctggaacgtatagacttcagccatgagactgaagtgtctgcagcgatcgaggccaaagtaaatgaaattcaggcgggcattcatttaagcgaaggaccgctggtgaagctggggctattccattgccccgatggagatcatttgctgatggctattcatcacttagtagtggataccgtatcctggcgcattttgttcgaggatcttacgacagcctatgaacaggcattgcacgggcaagcggctcgtcttccgcacaaaacggattcgttccgtaactgggctgaggcacagtctcactatgcgaacggtccagcaatggaagcagagttctcattctggaaagaagtggaacagggaaggtatgagccgcttccaaaagaccagccacagtcatcttccttgaataaagacagcgagcttatgacggtcacatggaccactcaggaaacggagcagttgttaaaacaagcgcatcgtgcctacaacacagatatgaatgatctgctgctgaccgcactcggcctggctattcatcgctgggcggggattgaacgcgtactcgtcaacttggaaggccatggacgggaatccattttgccagagctggatattacgcgcacggtgggctggtttacgagtcaattcccggttgtcctggatatgagcgcagggcaagatctttcacaacgtatcaaacaggtgaaagaagggctgcaccggattccgcaaaagggtattggctacgggatgctgagatacctatctgcagcatgtgagcaagcgcattttggaaccgaacctgaaatcagctttaactatctcggacaatttgaccaggatatgcaacatcaatccattggcgtgtctccttacgctagtggtgccgagcttagcgcacatgcagccagatcgcacacgctggatctgaacggactgatttccgaaggtcaattgcaattgacgatcagctacagccatcaggaatatcgcaaggaaacgatggaacagctagccgaagcgctcagaaccagcctgcaggaaatcatcgcgcattgcgcgggtcgcaaacagcaggaactgacgccaagtgatgtgatgcttaaacctgtaaccttggccgagctagatcagttggtcgaacggacgcgtgacatcggggaactggaaaatgtatatgcattgacaccgatgcaaaaagggatgttgttccatagtctaatggatgcagaatcaggggcttattttgaacaaacgacctttgatctacacggacgcttccagcccgatattttccaagatagcttgaatcaactggcgcagcggcatgagatctttagagccaatttcatcagcgggtggcaggatgagcccgtacaggtgattttccgccataaagaggttggtttcagatgtgaagatttgcgtcatttggatgatcaggaacgtgacgcgtatgtgcaggaatttattcgccaggacaaggcagctggattcgatttgtcccgggatgcgttgatgcgcgtggcgattttgcggacaggtgatgaggattattattttgtatggagttctcatcacatcctaatggacggctggtgtgtggcgttggtaacggatgaggtgtttgaggtttactttgcagccgtagagcatagagcaccgaagctcccccctgtgactccatacagtcagtatattgcgtggctggaagcacaggatgtagaagcagcagcctcgtactggaaggaatatttgctgggctatgatcaacaaacttcgattccgaccggaaaagtaggcgcgaaagcggacggcgaacaatttgagcatgtactgtgcgacctaggtaaggatttaacaggacgtatggaaatggtagccaagcagtatcacgtgaccaccaatacgctcctacaaacggcctggggcttactgcttcaaaagtacaacggtagtaacgacgctgtctttggcggtgtagtatcgggtcgcccggcagatatttcagggatcgaaaacatggtgggcttgttcattaacaccattccagtacgtatccgtagtaaggctgaggacacctttgccgacctgattagagcgaatcagcagcaggcgctggcttctcaagattatgaaacgtatccgctgtatgaaattcaagccttgaccgagcaaaagcaagagctgatccagcacattatcgtgtttgaaaactatccggtggaggagcaggtcgagcagcttggcgaaggtgcggaatcggattttgtcatcagcaatgcagggatgattgaacaaacgaactatgatttcaatctggtcgtcatgccgcaggaagcgatgaaaatccgattcgaatacaatgcgaagttatatgatcgggaagcggtggaacggacgcagggtcatctggtacagctgctggagcaggtggtagcgcagccggacattcaagtgcaggagctggatgtgttaagcgagcaggaacgcgagcaaattctccgtgtatggggagatacagctgctgagtatccaagcgatcaaacgatccatggcttgttcgaagcacaagcagtgcagacaccggaacagccagcgctgtacttcgaaggagagcagttgacctatcgcgagctgaatgaacgtgcgaatcgtctggctcgtaccttacgcagtcaaggcgtgacgaaggatcggctggtgggtctgatgaccgagcgttcggtagacttgattgtgggtatgttaggcattttgaaagctgggggcgcatatgttccaatcgatccaacgtatccagaggagcgtatccgctatatgctggatgactcgggagcagagctgttgttgacgcaaagccacttggtggacaaagtagctttcgacggtcaggtgctggtgctgaatggggcagagagtgtgcatcacgaggatggctccaatctggagccgttgtccggtccgaacgatctaacgtatgtgatttatacgtcgggtacgacggggcagccgaagggtgtcatggtagagcatcgc

SEQ ID NO: 414 - DNA, 19908 bp, Paenibacillus polymyxa
  source 1..19908: mol_type = genomic DNA
  misc_feature 1..19908: note = strain LU17007 mutant with genomic deletion
acggccgagaaatttgtagagaacccgtttgccggaggcaaagcaggctatgaacggatgtaccgcaccggcgatttggcgagatggatgccggacggcaacattgaatatctgggccggatcgatcatcaggtgaaaatcaggggttatcggattgagctgggcgaggtcgaatcgcagctgctccaggtggaatcggtacgcgaagcggtcgtcgtggcccgtatggacgaaatgggccaaaaccacatggtggcctactatgtcgcgggacaagaagtcgaggccagcaagctaagaagtgagctgggacgggagttgccaggctacatggtgccatcctactttgtacaactggaacagctgccactgacaccgaatggcaaaatcgaccgcaaggccttgcctgcaccagagggcagcctgcaaaccggagtcgattatgccgagccgcgtacggcgcaagaacgcgctttggtagccgtctgggagtcggtactggggctgcagacggtcggtattctggacaatttcttcgacctgggcggtgattcgatcaaggcgatccaaatcgcctcccgtgcgttccaggccggctataagctggacatgaaggatttgttccagtatccaaccgttgaagccctggcaccgcatatgcaagaggtccgtcgtatggcagatcaggaagaagtcagcggggaaacggcgctacttccgatccagcattggttctttgcgcaggagcgcgagcgtccgcagcactttaatcaagcggttatgctctatcgcgccgagggttttgatgagacagcggttcgccaagccatggatcacctcgtgaagcatcatgatgcgctgcgtacggtattccatcagacttccgctggttatacagcttggactcgccatgtagaggaaggcacgttatatacactggaaactttggattaccgtgaacgggccgcttatgcggaagcgctggaagcgaaggcaatggaaattcaaagcagcatggacctgtccgcaggacccttggtgaaactcggattgttctgcacaaccgagggcgaccatctgctgatcgctattcaccacttggtggtggacggggtgtcgtggcggattctgtttgaagatttctcgacaggctacgagcaggcgatccagggcgagcctgtacgattgccctataaaacagattccttccaaacgtgggcacgggagttatcctcttatgctaaccgtcctgaggctgtatcggatgaagtctattggaagcagctggaacaggtcaaagctgaagctgcaccactgcctaaggattttgcctatgagggctccgtgaatgcagacagcgaagtgctaacggtggagtggactgaagctgaaaccgagcaactgttgaagcaggcccatcgcgcctataacaccgaggtcaatgatttgctgctgaccgcgctgggactcgcggtgcacaactggacaggtgcaggacatgtactggtgaacctggagggccatggtcgggaagcgatcttgccagaggtggatattacacgtacagtaggctggtttacgagcttgtatccagtgctgctggagaccggcaaggaaatgacactggcagagcggattaaagaaacgaaggaaggcttgcggcgcattccgcataaagggctgacctatggcacttggcgttacctgtcctctgcgttgcctgcagatgaaatggatacgatcgcagccgaaccggaaatcagctttaactatttggggcaggtcgatcaggatctgcaaaacagtggaattacgttgtcctcctaccgtgcaggggagacagaggatgcccattcaccgttactgtacacgctggatttgaacgcaatgatctcggaaggcacgctgcgtttgacgatcgcttacagccgtaagcagtatcgtaaagaaacgctggaacgagtggcggggctaatgaaatccgctttgcaggaggtcattacgcattgcgtcgctcaggagcggccagagcttaccccaagtgatgtatccttcaaaggtctgacgactggtgagctggaacagattgcggaacaggcggcacgtatcggtgagctggaaaatgtatacgcactgacgccgatgcagaagggcatgctcttttacaatctgatggattcgcaatcgggagcttattttgaacaggcctcctttgatctgcgaggacattttaatatcgctgcctttgcagccagtttggatgtcttggtgcagcggcatacggtactgcgcacgaacttctacagcggctggaaggatgaaccgcttcaggtcgtgtaccggaataagcgcagcgaactgtatgttgaagatttaagggacatggaggacgagcagcaaaacgaatacatgctcgaatttacgcgtaaagacaagcaaagaggctttgacctggcacaagacgccttgatgcgtgtcgctgtgttgcgcacaggtgaggagacgtatcgttttgtatggagcttccaccatattgtgatggacggctggtgcttgtcgctggtgacaaacgaagtgtttgcaagttattttgcgatactggctcataaacaacctgaactggcccctgtaaccccgtacagtcaatatatcgaatggctagagcagcaggatcgtcaggctgcatcaagctactggagcaaggttttggaagggtatgaggagcagtcccgcttgccacaggcaaaaattcagggtaagacggggtatcaggcggagcgtctggattttgatttgggcgcagagctcacagctggtattcagcgcatagccaagcgttatcaggtcaccatcaatacgttgatgcagaccgtatggggccttttgctgcaaaaatataatggcaccgatgatgtcgtgtttggcagtgtggtatctggacgtccggcagacattccgaatgtggagcatatcattggtctgtttatcaatacgattccggtgcgtatccacagtcaggtggacagcgtattctccgacgtgatgaagcacatccaggagcaatcgatcgattcccatgtgtatgatacgtatccgttgtatgaaattcaggggttgtcggagcttaagcaggatttgatccatcatattcttatttttgaaaattatccggtagaggaacaaatcgagcaattaggtagtagtgaggcgtccagcttcacgatcacaggagccgagtctgtcgagcagaccaactatgactttaacgtggtagtgctgccggggaataccattcacatgagctttggctataatgccctagcctttgaacgggaaagtgtggaacaaattcgaggtcatctggtgcagctactggagcaggtgacagcgaatccgaacattcgcgtacatgaactggacatggttacgatgcaggagcgtaagcaaatcgttgaggtgtggggcaatacagcggcagcctatgcaagcgagcaaacgattcacggcttgttcgaggcgcaaaccgcgcagacgccagagcagacagccttgttctttgaaggagagcagctgacttatcgcgagctgaatgaacgcgccaatcgattagcgcgtaccttgcgcagtcaaggcgtgacgaaagatcgtttggtgggtctgatgaccgagcggtcggtggacatgcttgtgggcatcttcgggattttaaaagccggaggcgcctatgttcctatcgatccaacctatccggaggaacgtatccgctatatgctggatgactcgggagcgaagctgctattgacacaaagtcatctggtggacaaagccgttatcgacggtcaagtgctggtattggatggggaacaatcggtgtaccacgaggatggttccaacctggagccgctgtctggtccaaacgatttggcgtatgtgatctacacgtcaggtacaaccgggcagccgaagggcgtgatgctggagcaccacgggctgtgcaatctgaaaacgtattttgatcagacgctcaagattcgtgcgtcggatcatgcgctgctatttgccagctactcgtttgatgcggcttgctgggaaatcttccaggcgctgttctgcggggctacgttatacgtgccaacaacagagacgattttgaactacgaacggtttgagcaatatatggcggatcaccacattacggtggctgctttgccgccaacttatgcagtgtatttggagccggggcggatgccgcacctgcgtattctgttcactgcgggttcagcctcatccaccgaactggtatacaagtggaaggatcaggtggcgtactacaatggctatggtccaaccgaaaactcggtggcaacatccatctggccggtatccgaggatgaaagggcaggacaactcatttccatcggacgtcctgtgccgaatcaccgggtatacatggtggatgtgcatggacatttggcgccggtcggcgtagcaggtgagctgtgcgtgtccggtccgggtctggcgcgtggttatctggatcgcccagagctgacggcggagaaattcgtagcgaacccgtttgcggcgggtgaagcaggctatgaacgaatgtaccgtacgggggacttggcgagatggatgcctgatggcaacattgaatatttgggccggatcgaccatcaggtgaaaatccggggctaccggatcgaactcggcgaagtcgaggcacaaatgttgaaagtggaaaacgtgcaagaagtcatcgtcctggctcaagcggacgagcagggacaaaaccaactggtggcgtactatgtcgctgaaagagacgtaagcgctggggagctgcgcggcttcctgggtgaggagctgccaaactacatggtgccttcgtatttcatccagctggagcagatgccgctgacaccgaacggcaaaatcgaccgtaaggccctgccggcaccggaaggcagtctgcaaagcggagcggattatgtagagccgcgcacagcgctggagcagacgttggcttcgatttggcagtctgtattaggaacgaagaacatcggtattttagataatttctttgatctgggcggcgattcgatcaaagcaatccaggtatcctcccgcttgctgcaagcgggctacaagctggacatgaaggatttgttccaatatccatccatttcgctgctgagtggtcatgtacacccagttagtcgtacggccgatcagggcgaggtttcgggcagcgtcaagctgaccccgatccagcagtggttttttggactatcgtcggcagagccgcattatttcaaccagtcggtgatgctgcatcgagcagaaggctttgatatagatgcattgcatcgcacggtgacccaggtgacggagcatcatgatgcgttgcgtatggtcttccgtcagaccgaacagggctatgaagcgtggaatcgcggtgtgaacgaaggcgagctgtatcatctggacgttgtagatttgacaggcgtcgaagatacggcagatgtgatgatggcgattgagatgaaagccaatgccatccaaagctctattcatctggatgaaggaccgctggtgaagctgggactcttccgctgcatggatggagatcatttactgattgccattcaccatttggttatagacgggatctcatggcggattgtgtttgaagattttgcgactggatatgaacaggccattcggggagaagcgattcgcttgccttataaaacggattcgttctctgcttgggcagagcggttgtctcaatatgcgaacagtccggccattgacaacgaacgcgaatactggcagcgtcttgctcacatggcagtcgcatcgctacctaaggatcaagacaaagcagcaggacagcctttttgggtcagagatagtgagacggtgaccgtggcttggaacgaacaggaaacccggttgctgcttcaggaatcacatcgtgcgtacaatacggaggtcaatgatctgctgttaaccgcactcggcagcgcattgtacaactggagcggtcaggagcgtgtgctggtcaatctggagggacatggccgggaggctattgttccagatgtggatatcacacgtaccgtgggctggtttacgagtcagtatccggtgctgctggatgtcgatggaaaggcggaagtagggcagcgcatcaagcgggtcaaagaggacctgcgtcatgtgccgcataagggcattggctacggtattttgaagtatatgtcttcggatgatgctacctcttcctggagcctgcagccagagatcagctttaactatttgggacaatttgatcaggatttggaacagagtgacatcgtgctgtcttcgcatacggacggagagccgatgagtggttataccgtgctggagcagccgctgaatgtgaacggcatgattacagcaggcgtgctgacactggaaattcgctatgacagccaagtatatcatcagcaaaacgtagaaaaatttgcgcagttgctacgggaaagcttgcaggaagtaatcaagcattgtgcctcccaagagcggagcgaactaacgccaagcgatgtcttgttcaaaggcttgtcgttggaacaactggagcaattgacggagcaaacggcttctgtgggcgaactggaaaatgtgtatgctctttctcccatgcagaaagggatgctgttccatagcttgatggagccagactcaggcgcatacttccagcaagcatcgtttgatcaaaaaggcagcttcgatgttgctattttccgtcagagcctggatctgctgacacagcgtcatgaagcgctgcggacgaatttctatcggtttgagaccggacatggtcaggagccattgcagattgtattccgtcacaaagatagcgacctttcctacaaggatgtacgcggaatgcggaaagcagaacaacaggcgtatatccaggcgttgaagcaggaggatcaggctcggggctttgatctcggtacggatgcactgatgcgcgtacaggtatggcagaccgatgaagaaacgtatcactgggtctggagcttccatcacattatcatggacggctggtgcttatcgctcgttacgggtgaggtgtttggtacgtactttgcgctgctggagcagaaacagccggagctggctccgatcacaccgtatggccaatatattgaatggctggagcgtcaggatgaacgtgcggcaaaagagtattggagcagctatttggcgggctttgaacagcagacgttgttgccaggatcggatactgcatcgaaagaccacgtgacggacagcagggaacatgcggtatcctcgacagcaagcgaagccagcgaatatgtttctgaaaaagtaacggtagatctggatccaacgtggagcgaagccatgtaccggattgccaagcagcagcaggtcacgattaatacgctgatgcagagcgtgtggggcctgattttgcagaaatataataacaatgaggatgttgtattcggcagtgtcgtatctggacgtccgacggatattgcgggtgtagaaaatatgatcggtctgttcattaatacgatcccggttcggattcaaagtgagcggaatgccacgtttgtggacatcatgcggaacacgcaggagcaagcgttggcttcgggagtatatgacagcttcccgctatatgaaatccaggcgctgaccgagcaaaagcaaaatctgattaatcacattatggtatttgagaattacccggtagaggagcaagtcgagcagttgggtgaagttcgtccgtctgcatttgacattacgaatgtagaggttgttgagcagacgaactatgatctggacttgattgtgatgccggatgacaccttccgcatcatgttcagatacaacgcgaatgtgtacgatcggtctacgatcgagcggatgcagggacatgtactgcatgtcattgagcaaatcgtgaacaatccgcatatccgtgtgaatgagctggaattggtgacaccagaagaacaggcacagatcgttcagatatggggagatacagcggcagcctatccgcaggatcagacgctaagcagtctgtttgagcagcaggtcgcgaacacgccggagcaagtggcagtgctgtgcggagcagaatcgttaacctacgctgagctgaacgagcgagccaatcgtttggcccggacgctacgtgcggaaggggtggaacccgatcagccggtgggcattctgcttcaccgttcgctggacatgatcgtaggtatctacgcgatcctcaaggcaggcggagcttatgtaccgatcgatccggaatatccggccgaccgcatccgctttatgctggaggattcaggcgcgaagctggtgctgacgcaatcgcatctggcggagcaagcatcgctgagtttcgacggccgggtgctggtgctggaccgtgaggacatctatcacgaagatggctcgaatctggagcccttggccggaccgcaccatgtggcctatgtgatctatacctccggttccaccggaaaaccgaagggtgtaatggtggagcaccattccgtgctaaaccggattttgtggatgcatgatcggtacggcttgggtgcggaaaatacgattctgcaaaagaccgccttcaccttcgacgtgtcggtgtgggagctgttctggtggtcgatggtcggctcaaaggtaagcctgctgtcggtcggcggggaaaagaacccggaagacatcgtcgacacgattgcccgcgatggcgtgactacgatgcactttgtaccagcaatgctgcatgcgttcctggagtatgtggaacagcagccacgagaagtgatgcaagcgaagctgggcacactgcgccatgtctttgccagtggtgaagcgttgccgccacagcatgtggcccggttccagcggctcgtgtcgagcctggccggagcgaagctggtcaatctgtatggcccaaccgaagcgacggtggacgtatcgtacttcgattgcgagcctgatggagcctattcggttattcctatcgggaaaccgattcaaaacattcgtctgtacatcgtcaaggaaggcacggagcaattgcagccaattggcgtggcaggggaactgtgcatcggcggtgtcggcgtagcccgcggttacctgaaccgtccggagctgacggccgagaaatttgtgaaagatccgtttgccggcggggaagcagggtatgagcgaatgtaccgcaccggcgatttggcgagatggatgccggacgggaacattgaatatctgggccggatcgaccatcaggtgaaaatccgggggtaccggattgagctgggcgaggtcgaaacgcagttgctccaagtggaatcggtacgcgaagccgtggtcatggctcgtgcagatgaaacgggacaaaaacacatggtggcctactatgttgccgggcaagaaatcagtgccagcgagctgagaagtgcgctggggcaggagctgccaagctacatggtaccatcgtactttgtacagctggagcagatgccactgagtcccaatggcaaaatcgaccgcaaggcactgccagcaccggaaggtagcctgcaaagcggagccgattatgtcccgccgcggacgtgggtggaagtgaagctggcgcaaatttggcaagatgtgctgggcctggcgcaagttggcgtgaaggaaaacttcttcgagattggcggacattcgctgcgggcgacgacactaacctcgaagattcaccaagagctgaacaagcagcttcctctgcgtagtatttttgaagcaccaacgattgaacaactggcggctgtgctggaacagctggatcaagtggcgtatgcgtccattccggtaacggaagagcgcagcttctatccactatcctcggcgcaaaaacgactgtatgtgctgcatcagttcgatccgcaggatgtgaactacaacatgccgtcggtgctgcaagtgagcggtccgctggacgtgaaacgagtggaacatatattccgtcaactgatcgcccgccatgcgaccttgcgtactcgctttgagctgatcgacagtgagccaatgcaatggatcgaggacaccgtaccgttcgaggtggaatatacgaaggtacaggcagagggtgcgactgcggatacagatcaggacacaactacagatacgtacaccagggtcaacatagaggcgcaacagctggtgcggcgctttgtccgtccgtttgatctcaaagctgcgccgctgctacgagtaggcttggtggatctgggccttcaaggagtagaacaggaatcccaacatctgcttatgctcgatatgcaccatatcgtctcagatggggtgtccctggaggtcctgactgatgagtttgtccgtttgtatggcggtgaagagctggcgccattgcggattcagtacaaagattatgccgtatggcagcaaagcgaagcccatcaggaatggatgcagcgtcaggaagcgtactggctgaacaccttccgaggggaactgcctgtgctggatctctctacggactttgcccgcccagcggtacagagtacggcaggggatacgatcgaatttgtactggagcgtgaggttagtgaacgcctgaaagaactggctgcccagaccggctctaccctgtatatggtgatgctggcggcgtacaccacactcttgcacaaatacacaggccaagaggacattgtagtcggtacgccgattgcaggacgaccgcatgcggagctcagtaatctagtcggtgtcttcattaacacgctggcgattcgcaattatccatccggcgatacatcgttccttgagtatctgcaagaggtcaaggagcaggcacttaatgcttatgagcatcaggattatccttttgaagagctggttgaaaaactgaatttaacccgggatacgagccggaatgcgctgttcgacacgatgtttgaattgaaaacatgggagcagcgggagttcgagctggaagggctgaccttgagctcctatccactggacaatcaaacggcaaaattcgatctgagcttggaggcgatagagcagccggaaggcattctgtgcagtctggaatacagcacagtgctgtacaagcgggagaccatgacgcgattggcacagcattttgcggaaatcgttcgagcgattgcctatcatccgcagcagccactggcagttttgaatatggtaaccgatgaggaacaagagcaactcatctacggttttggagaagtgggcgtatcggatgttgctgttgaagcaggagccctgttccatacctatgtggaaaaacaggcacagcttataccagatcaagtggcggtggtatacgaggggcaacagcttacgtaccggaaactgaacgagcgtgcgaaccaattggcgcgcagactaagaaatgaaggtatcggacgcgagtcgattgtcggcattttgagtgagcgctcggtagacatgctggtcggtgtgttggcggtatggaaggctggaggcgcatatgtgccgctggatgcggattatccgtccgaacgcattcgtttcatgctggaggacagcggtgcgacggtgctgttgacccagacgggattgcaggagcgcgcacaagcatggctgaatgaaagccaatggactttgggcgatgaaaaagctaagggtgagctggagacggcggttagcgctgaaacgatggaaagagacaacctgaatgaaggtttgagcttgaaatcagattcgaagtctgacagcgaagcagcatctgaatcggcaacaaagctgcgtctgcaaatcatgctggcattggacgatgagtcactgtacaccggagatacgacagacgttgatcacatcaatgaacctcaagatctggcgtatgtgatctacacctccggaacaaccggacgtccgaagggtgttatgatcgagcatcgctgcttggtgaatacggctgcggcgtatcgccgggattatcgcctgagcgagttcccagtccgactgctgcaactggccagcttctccttcgacgtgttcgtcggggatatggcgcggacgctctataacggcggcacgatggtcatttgtccgaaagacgaccgacttgattttagccgtctgcacggttggattcgtgattatcaaattaccgtgttcgaatcgactccggccctgatcgtaccgtttatgcagcatgtgcatgaacaggggctggacatgagcagcatggaactgctgatcactagctcggatagctgcagcgtgacggattaccgggtgctgcaagaacggtttggcgcagatatccgcatcatgaacagctatggcgtcacggaagcggcgattgactccagcttctatgatgaagaactgtcgaagctgccaagcagcggccatgtgccgattggtcaggcatggctgaatgcccgcttctacatcgtggacagccagctgaatccggtgccgatcggtgtactgggcgaactgtgcatcggcggcatcggggtcgcacgggggtacctaaaccgtgcggacctgacggccgagaagttcgtagcgaacccgtacgtaccgggcgaacgactgtaccgcacaggcgatttggcgcggtggatgccggacggcaatgtagactttatcggccgaatggatgatcaggtcaaaatccggggcttccggattgaactgggcgaggtggaagcgcagctgctgactgtggatggcattgagaaagccatcgtcaccgcctgggaaaacgaaaacggagacaaagatctgtgcgcgtatgtcgtagcctcggaggcgctgaatttgccggagctgcgcagcatactccagcccaaactgccgggctatatgatcccgacgtatgtcgtaccactggatcaattcccgctgacaccaaacggaaaaattgaccgcaaagcgttgccagcaccggaagcgcgcctcgaaggaggcacggagtatgttgcgccgcggacaccgctggaagagcaactggtacgtatttggcaaagcgttctgaatcatcagcgggtaggcatccaggataacttctttgaagtgggaggacattctctgcgcgctacaacactgatggcgaaaatccatcaggagctgaatcacaagctggccttgcgagatattttccaatatccgacgattgagcaattggtacaggtgatgggtgaagatcagacccagcaaatgtatgtatccatacctgtggcggaggagcgcgaatattatcccgtttcctcggcgcaaaaacggatgtacgtgctgagtcatctggaaggcggagaggtgagctacaacatgccaggagctttgattatcgaaggctccttggataaaaagcgactggaacaagccttccgccagctgattgcccgtcacgaaaccttgcgaacccgattcgagatggtggatggcgaggtgattcagcggattgaatctaacgtcccattcagcgtggagtatgtgcaagcaagcgaagaagagacaccgcagtacgcacaggactttgtacgtgcctttgatctcgcacaagccccgttgctgcgggttcagttgatcgaaaacggaccggggcgtcacgttatgctctatgacatgcaccatattatttcggatggcgtgacagaaggaattatcgtgcaggagttctctcaattgtatgaaggcaaggaactgccgcccctgcggatacagtacaaggactatgcggtttggcagcatgcagatatgcaaagtgaacgtcttcgtgcgcaagaaagctattggctgaacaccatgtctggtgaaattccggcactggatatgccaacggattttacaagacccgccgtacagcgtctggaaggaactcgatttgagtttgcgatctgcatggaggacagcgagcagttgaagcagctggccgcgcaaaccggatccaccttgtacatggtattgcttgcagcgtatagcacactcttgcataaatacacgggtcaagaggacatcatcgtcggcacgccgattgccggaagaccacatgcggagctgggtagcctagtaggcgtattcctgaacacactggcgattcgcaattatccgtctggtgataaaacgttcttggactacttgcaagaggtcaaagagcatgcgctcagtgcgtatgagcaccaggaatatccgtttgaggagctggttgaaaagctgaatgtaacgcgggatacgagccggaatgcgctgtttgatacgatgtttgagctgaaaacatttgagcagcaggagttcgagctggaagggctgaccttcaagccgtatccgacggacgatcatacgtccaaatttgatctgaccttggatgccgtagagcagtcagaaggcattctgtgcagtctggaatacagcacggcgctgtacaagcctgagaccatcgcgcgctttgcacagcattttactgaactcgtacgagccattacacttcacccacagcagtcactgtccgctttggatatggtaactgtcgaggaaaaagcacaaatcatctatggttttggagatgtaggcgtatcggatgttgctacagttgaagcagaagccttattccatgtctttgtggaagaacaggcccagcttgtaccagatcatgtggcggtggtgtacgaagagcaacaacttacgtaccgcacactgaatgaacgttcgaaccaactcgctcgcagactgcgaaatgaaggtatcggacgcgaatcgattgtcggcatttggagtgaacgctcggtaaacatgctggtcggcgtactggcggtgtggaaggctggaggcgcatatgtgccgctggatgcagactatccgtccgagcgcattcgtttcatgctggaggatagcggtgcgacggtgctgctcacgcaaaccagtttgcaggagcgtgcccaggcatggctggagaaaagcgatcaggccttggtcgaagggcagactgagggtgagctggaaacagcggctggcgctgaaacgatggaatcaggtgctcttcatggaaacctaaatggaacagcagattcgaagtctgacagcgaagcagcatccgaatcggcaacagggctgcgtctgcataccgtactggcattggacgatgagtcactgtacaccggtgatacgacagacgttgaacctatcaatgaaccgcacgatctggcgtatgtgatttacacctctggcacaaccggacgtccgaagggcgtcatgattgagcatcgcagcctggtaaatacggctgcggcgtatcgccgggattaccgtctgaaccagttcccggtacgactgctgcaactggccagcttctccttcgacgtgttcgtcggtgatattgcacggacgctctataacgggggcacgatggtcatctgtccaaaagatgaccggattgatccaagccgtctgtacggatggattcgcgattaccagattaccgtgttcgaatcgaccccggccctgatcgtaccgtttatgcagcatgtgcatgaacaggggctggacatgagcagtctggaactgctgatcaccagctcggatagctgcagcgtgacggattaccgggtgctgcaagaacggtttggtgcgaatatccgcatcatgaacagctacggcgtcaccgaagcggcaattgactccagcttctacgacgaagaactgtcgaagctgccaagcagtggccatgtgccgattggtcaggcgtggctgaacgcacgcttctacattgtggacagtcagctgaatccggtgccgatcggcgtactgggcgaactgtgcatcggcggcatcggggtcgcacgagggtacctgaaccgtgcggatctgacagccgagaagtttgtagcgaacccgtacgtaccaggtgaacgactgtaccgcacaggtgacttggcgcggtggatgccggacggcaatgtagactttatcggccggatggactatcaagtcaaaatccggggctaccggatcgagctgggcgagattgaaacggcgatccagcgggtgccgggtgtgcgtcaagccgtggtcatcgatcggacagacgagcgtggacacaagtatttgtgtggatacattacgggagaaacagaggagctgcggatcgaggaaatacaggcagccctggaagcaggactccccgcgcacatggtgcctgcacgcttgatgcgtctggaggccattccgctgaccagcaacggcaaaatcgaccgcaaggccttgccagagccggaaggcagcatccatacgggagcagcctatgtggccccgcgtaccaaggtggagcaagtactggctgcggtatgggccggagtgctgagcgtggaagccgtaggcacgcaggataacttcttcgagctgggcggcgattcgatcaaggctctgcaagtctcgtctcgcttgctgcaagcaggttatcgactggagatgaaagacctgttcagtcatccgacggtgtctgccttggcgctgaaagtccaatcggttacccgattggcggatcaaagcgaagtggtgggcactgtgaagctgacacctgttcagcattggttctttgagcaaaacctgacggatgctcatcatcataaccaatccattatgctgcatagcaaggacggttttaatgtagcggcgctgcgtacagcgatggatcaaatggttagtcatcatgatgcactgcggatcgttttccgccttaccgagcacgggtatgaagcttggaaccgcgcggtgggtgagggcgagctgtatacgctggaacgtatagacttcagccatgagactgaagtgtctgcagcgatcgaggccaaagtaaatgaaattcaggcgggcattcatttaagcgaaggaccgctggtgaagctggggctattccattgccccgatggagatcatttgctgatggctattcatcacttagtagtggataccgtatcctggcgcattttgttcgaggatcttacgacagcctatgaacaggcattgcacgggcaagcggctcgtcttccgcacaaaacggattcgttccgtaactgggctgaggcacagtctcactatgcgaacggtccagcaatggaagcagagttctcattctggaaagaagtggaacagggaaggtatgagccgcttccaaaagaccagccacagtcatcttccttgaataaagacagcgagcttatgacggtcacatggaccactcaggaaacggagcagttgttaaaacaagcgcatcgtgcctacaacacagatatgaatgatctgctgctgaccgcactcggcctggctattcatcgctgggcggggattgaacgcgtactcgtcaacttggaaggccatggacgggaatccattttgccagagctggatattacgcgcacggtgggctggtttacgagtcaattcccggttgtcctggatatgagcgcagggcaagatctttcacaacgtatcaaacaggtgaaagaagggctgcaccggattccgcaaaagggtattggctacgggatgctgagatacctatctgcagcatgtgagcaagcgcattttggaaccgaacctgaaatcagctttaactatctcggacaatttgaccaggatatgcaacatcaatccattggcgtgtctccttacgctagtggtgccgagcttagcgcacatgcagccagatcgcacacgctggatctgaacggactgatttccgaaggtcaattgcaattgacgatcagctacagccatcaggaatatcgcaaggaaacgatggaacagctagccgaagcgctcagaaccagcctgcaggaaatcatcgcgcattgcgcgggtcgcaaacagcaggaactgacgccaagtgatgtgatgcttaaacctgtaaccttggccgagctagatcagttggtcgaacggacgcgtgacatcggggaactggaaaatgtatatgcattgacaccgatgcaaaaagggatgttgttccatagtctaatggatgcagaatcaggggcttattttgaacaaacgacctttgatctacacggacgcttccagcccgatattttccaagatagcttgaatcaactggcgcagcggcatgagatctttagagccaatttcatcagcgggtggcaggatgagcccgtacaggtgattttccgccataaagaggttggtttcagatgtgaagatttgcgtcatttggatgatcaggaacgtgacgcgtatgtgcaggaatttattcgccaggacaaggcagctggattcgatttgtcccgggatgcgttgatgcgcgtggcgattttgcggacaggtgatgaggattattattttgtatggagttctcatcacatcctaatggacggctggtgtgtggcgttggtaacggatgaggtgtttgaggtttactttgcagccgtagagcatagagcaccgaagctcccccctgtgactccatacagtcagtatattgcgtggctggaagcacaggatgtagaagcagcagcctcgtactggaaggaatatttgctgggctatgatcaacaaacttcgattccgaccggaaaagtaggcgcgaaagcggacggcgaacaatttgagcatgtactgtgcgacctaggtaaggatttaacaggacgtatggaaatggtagccaagcagtatcacgtgaccaccaatacgctcctacaaacggcctggggcttactgcttcaaaagtacaacggtagtaacgacgctgtctttggcggtgtagtatcgggtcgcccggcagatatttcagggatcgaaaacatggtgggcttgttcattaacaccattccagtacgtatccgtagtaaggctgaggacacctttgccgacctgattagagcgaatcagcagcaggcgctggcttctcaagattatgaaacgtatccgctgtatgaaattcaagccttgaccgagcaaaagcaagagctgatccagcacattatcgtgtttgaaaactatccggtggaggagcaggtcgagcagcttggcgaaggtgcggaatcggattttgtcatcagcaatgcagggatgattgaacaaacgaactatgatttcaatctggtcgtcatgccgcaggaagcgatgaaaatccgattcgaatacaatgcgaagttatatgatcgggaagcggtggaacggacgcagggtcatctggtacagctgctggagcaggtggtagcgcagccggacattcaagtgcaggagctggatgtgttaagcgagcaggaacgcgagcaaattctccgtgtatggggagatacagctgctgagtatccaagcgatcaaacgatccatggcttgttcgaagcacaagcagtgcagacaccggaacagccagcgctgtacttcgaaggagagcagttgacctatcgcgagctgaatgaacgtgcgaatcgtctggctcgtaccttacgcagtcaaggcgtgacgaaggatcggctggtgggtctgatgaccgagcgttcggtagacttgattgtgggtatgttaggcattttgaaagctgggggcgcatatgttccaatcgatccaacgtatccagaggagcgtatccgctatatgctggatgactcgggagcagagctgttgttgacgcaaagccacttggtggacaaagtagctttcgacggtcaggtgctggtgctgaatggggcagagagtgtgcatcacgaggatggctccaatctggagccgttgtccggtccgaacgatctaacgtatgtgatttatacgtcgggtacgacggggcagccgaagggtgtcatggtagagcatcgc

SEQ ID NO: 415 - DNA, 19923 bp, Paenibacillus polymyxa
  source 1..19923: mol_type = genomic DNA
  misc_feature 1..19923: note = strain LU17007 mutant with genomic deletion
gcgatgctctaccatgacacccttcggctgccccgtcgtacccgacgtataaatcacatacgttagatcgttcggaccggacaacggctccagattggagccatcctcgtgatgcacactctctgccccattcagcaccagcacctgaccgtcgaaagctactttgtccaccaagtggctttgcgtcaacaacagctctgctcccgagtcatccagcatatagcggatacgctcctctggatacgttggatcgattggaacatatgcgcccccagctttcaaaatgcctaacatacccacaatcaagtctaccgaacgctcggtcatcagacccaccagccgatccttcgtcacgccttgactgcgtaaggtacgagccagacgattcgcacgttcattcagctcgcgataggtcaactgctctccttcgaagtacagcgctggctgttccggtgtctgcactgcttgtgcttcgaacaagccatggatcgtttgatcgcttggatactcagcagctgtatctccccatacacggagaatttgctcgcgttcctgctcgcttaacacatccagctcctgcacttgaatgtccggctgcgctaccacctgctccagcagctgtaccagatgaccctgcgtccgttccaccgcttcccgatcatataacttcgcattgtattcgaatcggattttcatcgcttcctgcggcatgacgaccagattgaaatcatagttcgtttgttcaatcatccctgcattgctgatgacaaaatccgattccgcaccttcgccaagctgctcgacctgctcctccaccggatagttttcaaacacgataatgtgctggatcagctcttgcttttgctcggtcaaggcttgaatttcatacagcggatacgtttcataatcttgagaagccagcgcctgctgctgattcgctctaatcaggtcggcaaaggtgtcctcagccttactacggatacgtactggaatggtgttaatgaacaagcccaccatgttttcgatccctgaaatatctgccgggcgacccgatactacaccgccaaagacagcgtcgttactaccgttgtacttttgaagcagtaagccccaggccgtttgtaggagcgtattggtggtcacgtgatactgcttggctaccatttccatacgtcctgttaaatccttacctaggtcgcacagtacatgctcaaattgttcgccgtccgctttcgcgcctacttttccggtcggaatcgaagtttgttgatcatagcccagcaaatattccttccagtacgaggctgctgcttctacatcctgtgcttccagccacgcaatatactgactgtatggagtcacaggggggagcttcggtgctctatgctctacggctgcaaagtaaacctcaaacacctcatccgttaccaacgccacacaccagccgtccattaggatgtgatgagaactccatacaaaataataatcctcatcacctgtccgcaaaatcgccacgcgcatcaacgcatcccgggacaaatcgaatccagctgccttgtcctggcgaataaattcctgcacatacgcgtcacgttcctgatcatccaaatgacgcaaatcttcacatctgaaaccaacctctttatggcggaaaatcacctgtacgggctcatcctgccacccgctgatgaaattggctctaaagatctcatgccgctgcgccagttgattcaagctatcttggaaaatatcgggctggaagcgtccgtgtagatcaaaggtcgtttgttcaaaataagcccctgattctgcatccattagactatggaacaacatccctttttgcatcggtgtcaatgcatatacattttccagttccccgatgtcacgcgtccgttcgaccaactgatctagctcggccaaggttacaggtttaagcatcacatcacttggcgtcagttcctgctgtttgcgacccgcgcaatgcgcgatgatttcctgcaggctggttctgagcgcttcggctagctgttccatcgtttccttgcgatattcctgatggctgtagctgatcgtcaattgcaattgaccttcggaaatcagtccgttcagatccagcgtgtgcgatctggctgcatgtgcgctaagctcggcaccactagcgtaaggagacacgccaatggattgatgttgcatatcctggtcaaattgtccgagatagttaaagctgatttcaggttcggttccaaaatgcgcttgctcacatgctgcagataggtatctcagcatcccgtagccaatacccttttgcggaatccggtgcagcccttctttcacctgtttgatacgttgtgaaagatcttgccctgcgctcatatccaggacaaccgggaattgactcgtaaaccagcccaccgtgcgcgtaatatccagctctggcaaaatggattcccgtccatggccttccaagttgacgagtacgcgttcaatccccgcccagcgatgaatagccaggccgagtgcggtcagcagcagatcattcatatctgtgttgtaggcacgatgcgcttgttttaacaactgctccgtttcctgagtggtccatgtgaccgtcataagctcgctgtctttattcaaggaagatgactgtggctggtcttttggaagcggctcataccttccctgttccacttctttccagaatgagaactctgcttccattgctggaccgttcgcatagtgagactgtgcctcagcccagttacggaacgaatccgttttgtgcggaagacgagccgcttgcccgtgcaatgcctgttcataggctgtcgtaagatcctcgaacaaaatgcgccaggatacggtatccactactaagtgatgaatagccatcagcaaatgatctccatcggggcaatggaatagccccagcttcaccagcggtccttcgcttaaatgaatgcccgcctgaatttcatttactttggcctcgatcgctgcagacacttcagtctcatggctgaagtctatacgttccagcgtatacagctcgccctcacccaccgcgcggttccaagcttcatacccgtgctcggtaaggcggaaaacgatccgcagtgcatcatgatgactaaccatttgatccatcgctgtacgcagcgccgctacattaaaaccgtccttgctatgcagcataatggattggttatgatgatgagcatccgtcaggttttgctcaaagaaccaatgctgaacaggtgtcagcttcacagtgcccaccacttcgctttgatccgccaatcgggtaaccgattggactttcagcgccaaggcagacaccgtcggatgactgaacaggtctttcatctccagtcgataacctgcttgcagcaagcgagacgagacttgcagagccttgatcgaatcgccgcccagctcgaagaagttatcctgcgtgcctacggcatccacgcccagcactccggcccataccgcagccagtacttgctccaccttggtacgcggggccacataggctgctcccgtatggatgctgccttccggctctggcaaggccttgcggtcgattttgccgttgctggtcagcggaatggcctccagacgcatcaagcgtgcaggcaccatgtgcgcggggagtcctgcttccagggctgcctgtatttcctcgatccgcagctcctctgtttctcccgtaatgtatccacacaaatacttgtgtccacgctcgtctgtccgatcgatgaccacggcttgacgcacacccggcacccgctggatcgccgtttcaatctcgcccagctcgatccggtagccccggattttgacttgatagtccatccggccgataaagtctacattgccgtccggcatccaccgcgccaagtcacctgtgcggtacagtcgttcacctggtacgtacgggttcgctacaaacttctcggctgtcagatccgcacggttcaggtaccctcgtgcgaccccgatgccgccgatgcacagttcgcccagtacgccgatcggcaccggattcagctgactgtccacaatgtagaagcgtgcgttcagccacgcctgaccaatcggcacatggccactgcttggcagcttcgacagttcttcgtcgtagaagctggagtcaattgccgcttcggtgacgccgtagctgttcatgatgcggatattcgcaccaaaccgttcttgcagcacccggtaatccgtcacgctgcagctatccgagctggtgatcagcagttccagactgctcatgtccagcccctgttcatgcacatgctgcataaacggtacgatcagggccggggtcgattcgaacacggtaatctggtaatcgcgaatccatccgtacagacggcttggatcaatccggtcatcttttggacagatgaccatcgtgcccccgttatagagcgtccgtgcaatatcaccgacgaacacgtcgaaggagaagctggccagttgcagcagtcgtaccgggaactggttcagacggtaatcccggcgatacgccgcagccgtatttaccaggctgcgatgctcaatcatgacgcccttcggacgtccggttgtgccagaggtgtaaatcacatacgccagatcgtgcggttcattgataggttcaacgtctgtcgtatcaccggtgtacagtgactcatcgtccaatgccagtacggtatgcagacgcagccctgttgccgattcggatgctgcttcgctgtcagacttcgaatctgctgttccatttaggtttccatgaagagcacctgattccatcgtttcagcgccagccgctgtttccagctcaccctcagtctgcccttcgaccaaggcctgatcgcttttctccagccatgcctgggcacgctcctgcaaactggtttgcgtgagcagcaccgtcgcaccgctatcctccagcatgaaacgaatgcgctcggacggatagtctgcatccagcggcacatatgcgcctccagccttccacaccgccagtacgccgaccagcatgtttaccgagcgttcactccaaatgccgacaatcgattcgcgtccgataccttcatttcgcagtctgcgagcgagttggttcgaacgttcattcagtgtgcggtacgtaagttgttgctcttcgtacaccaccgccacatgatctggtacaagctgggcctgttcttccacaaagacatggaataaggcttctgcttcaactgtagcaacatccgatacgcctacatctccaaaaccatagatgatttgtgctttttcctcgacagttaccatatccaaagcggacagtgactgctgtgggtgaagtgtaatggctcgtacgagttcagtaaaatgctgtgcaaagcgcgcgatggtctcaggcttgtacagcgccgtgctgtattccagactgcacagaatgccttctgactgctctacggcatccaaggtcagatcaaatttggacgtatgatcgtccgtcggatacggcttgaaggtcagcccttccagctcgaactcctgctgctcaaatgttttcagctcaaacatcgtatcaaacagcgcattccggctcgtatcccgcgttacattcagcttttcaaccagctcctcaaacggatattcctggtgctcatacgcactgagcgcatgctctttgacctcttgcaagtagtccaagaacgttttatcaccagacggataattgcgaatcgccagtgtgttcaggaatacgcctactaggctacccagctccgcatgtggtcttccggcaatcggcgtgccgacgatgatgtcctcttgacccgtgtatttatgcaagagtgtgctatacgctgcaagcaataccatgtacaaggtggatccggtttgcgcggccagctgcttcaactgctcgctgtcctccatgcagatcgcaaactcaaatcgagttccttccagacgctgtacggcgggtcttgtaaaatccgttggcatatccagtgccggaatttcaccagacatggtgttcagccaatagctttcttgcgcacgaagacgttcactttgcatatctgcatgctgccaaaccgcatagtccttgtactgtatccgcaggggcggcagttccttgccttcatacaattgagagaactcctgcacgataattccttctgtcacgccatccgaaataatatggtgcatgtcatagagcataacgtgacgccccggtccgttttcgatcaactgaacccgcagcaacggggcttgtgcgagatcaaaggcacgtacaaagtcctgtgcgtactgcggtgtctcttcttcgcttgcttgcacatactccacgctgaatgggacgttagattcaatccgctgaatcacctcgccatccaccatctcgaatcgggttcgcaaggtttcgtgacgggcaatcagctggcggaaggcttgttccagtcgctttttatccaaggagccttcgataatcaaagctcctggcatgttgtagctcacctctccgccttccagatgactcagcacgtacatccgtttttgcgccgaggaaacgggataatattcgcgctcctccgccacaggtatggatacatacatttgctgggtctgatcttcacccatcacctgtaccaattgctcaatcgtcggatattggaaaatatctcgcaaggccagcttgtgattcagctcctgatggattttcgccatcagtgttgtagcgcgcagagaatgtcctcccacttcaaagaagttatcctggatgcctacccgctgatgattcagaacgctttgccaaatacgtaccagttgctcttccagcggtgtccgcggcgcaacatactccgtgcctccttcgaggcgcgcttccggtgctggcaacgctttgcggtcaatttttccgtttggtgtcagcgggaattgatccagtggtacgacatacgtcgggatcatatagcccggcagtttgggctggagtatgctgcgcagctccggcaaattcagcgcctccgaggctacgacatacgcgcacagatctttgtctccgttttcgttttcccaggcggtgacgatggctttctcaatgccatccacagtcagcagctgcgcttccacctcgcccagttcaatccggaagccccggattttgacctgatcatccattcggccgataaagtctacattgccgtccggcatccaccgcgccaaatcgcctgtgcggtacagtcgttcgcccggtacgtacgggttcgctacgaacttctcggccgtcaggtccgcacggtttaggtacccccgtgcgaccccgatgccgccgatgcacagttcgcccagtacaccgatcggcaccggattcagctggctgtccacgatgtagaagcgggcattcagccatgcctgaccaatcggcacatggccgctgcttggcagcttcgacagttcttcatcatagaagctggagtcaatcgccgcttccgtgacgccatagctgttcatgatgcggatatctgcgccaaaccgttcttgcagcacccggtaatccgtcacgctgcagctatccgagctagtgatcagcagttccatgctgctcatgtccagcccctgttcatgcacatgctgcataaacggtacgatcagggccggagtcgattcgaacacggtaatttgataatcacgaatccaaccgtgcagacggctaaaatcaagtcggtcgtctttcggacaaatgaccatcgtgccgccgttatagagcgtccgcgccatatccccgacgaacacgtcgaaggagaagctggccagttgcagcagtcggactgggaactcgctcaggcgataatcccggcgatacgccgcagccgtattcaccaagcagcgatgctcgatcatgacgcccttcggacgtccggttgttccggaggtgtagatcacatacgccagatcttgaggttcattgatgtgatcaacgtctgtcgtatctccggtgtacagtgactcatcgtccaatgccagcatgatttgcagacgcagctttgttgccgattcagatgctgcttcgctgtcagacttcgaatctgatttcaagctcaaaccttcattcaggttgtctctttccatcgtttcagcgctaaccgccgtctccagctcacccttagctttttcatcgcccaaagtccattggctttcattcagccatgcttgtgcgcgctcctgcaatcccgtctgggtcaacagcaccgtcgcaccgctgtcctccagcatgaaacgaatgcgttcggacggataatccgcatccagcggcacatatgcgcctccagccttccataccgccaacacaccgaccagcatgtctaccgagcgctcactcaaaatgccgacaatcgactcgcgtccgataccttcatttcttagtctgcgcgccaattggttcgcacgctcgttcagtttccggtacgtaagctgttgcccctcgtataccaccgccacttgatctggtataagctgtgcctgtttttccacataggtatggaacagggctcctgcttcaacagcaacatccgatacgcccacttctccaaaaccgtagatgagttgctcttgttcctcatcggttaccatattcaaaactgccagtggctgctgcggatgataggcaatcgctcgaacgatttccgcaaaatgctgtgccaatcgcgtcatggtctcccgcttgtacagcactgtgctgtattccagactgcacagaatgccttccggctgctctatcgcctccaagctcagatcgaattttgccgtttgattgtccagtggataggagctcaaggtcagcccttccagctcgaactcccgctgctcccatgttttcaattcaaacatcgtgtcgaacagcgcattccggctcgtatcccgggttaaattcagtttttcaaccagctcttcaaaaggataatcctgatgctcataagcattaagtgcctgctccttgacctcttgcagatactcaaggaacgatgtatcgccggatggataattgcgaatcgccagcgtgttaatgaagacaccgactagattactgagctccgcatgcggtcgtcctgcaatcggcgtaccgactacaatgtcctcttggcctgtgtatttgtgcaagagtgtggtgtacgccgccagcatcaccatatacagggtagagccggtctgggcagccagttctttcaggcgttcactaacctcacgctccagtacaaattcgatcgtatcccctgccgtactctgtaccgctgggcgggcaaagtccgtagagagatccagcacaggcagttcccctcggaaggtgttcagccagtacgcttcctgacgctgcatccattcctgatgggcttcgctttgctgccatacggcataatctttgtactgaatccgcaatggcgccagctcttcaccgccatacaaacggacaaactcatcagtcaggacctccagggacaccccatctgagacgatatggtgcatatcgagcataagcagatgttgggattcctgttctactccttgaaggcccagatccaccaagcctactcgtagcagcggcgcagctttgagatcaaacggacggacaaagcgccgcaccagctgttgcgcctctatgttgaccctggtgtacgtatctgtagttgtgtcctgatctgtatccgcagtcgcaccctctgcctgtaccttcgtatattccacctcgaacggtacggtgtcctcgatccattgcattggctcactgtcgatcagctcaaagcgagtacgcaaggtcgcatggcgggcgatcagttgacggaatatatgttccactcgtttcacgtccagcggaccgctcacttgcagcaccgacggcatgttgtagttcacatccagcggatcgaactgatgcagcacatacagtcgtttttgcgccgaggacagtggatagaagctacgctcttccgttaccggaatggacgcatacgccacctgatccagaccttccagcacagccgccagttgttcaatcgttggtgcttcaaaaatactgcgcagaggaagctgcttgttcagctcttggtgaatcttcgaggttagtgtcgtcgcccgcagcgaatgtccgccaatttcgaagaagttttccttcacgccaacttgcgccaggcccagcacatcctgccaaatttgcgccagcttcacttccacccacgtccgcggcgggacataatcggctccgctttgcaggctaccttccggtgctggcagtgccttgcggtcgattttgccattgggactcagtggcatctgctccagctgtacaaagtacgatggtaccatgtagcttggcagctcctgccccagcgcacttctcagctcgctggcactgatttcttgcccggcaacatagtaggccaccatgtgtttttgtcccgtttcgtccgcacgagccatgaccacggcttcgcgtaccgattccacttggagcaactgcgtttcgacctcgcccagctcaatccggtacccccggattttcacctgatggtcgatccggcccagatattcaatgttcccgtccggcatccatctcgccaaatcgccggtacggtacatccgctcataccctgcttccccgccggcaaacggatcagctacaaatttctcggccgtcagctctggacggttcagatatcctcgtgctacgccgacaccgccgatgcacagttcccctgccacgccaattggctgcaattgctccgtgccttccttgacgatgtacagacgaatgttttgaatcggtttcccgatcggaataaccgaataggctccatcaggctcgcaatcgaagtacgatacgtccaccgttgcttcggttgggccatacaggttgaccagcttcgctccggccaggctcgacacgagccgctggtaccgggccacatgctgtggcggcaatgcttcgccactggcaaagacatggcgcagtgtgcccagcttcgcttgcatcacttctcgtggctgctgttccacatactccaggaacgcatgcagcatggctggaacaaagtgcatcgtgctcacgccatcgcgggcaatcgtgtcgacgatgtcttccgggttcttttccccgccgaccgacagcaggcttacctttgagccgaccatcgaccaccagaacagctcccacaccgacacgtcgaaggtgaagacggtcttttgcaggatcgtatcttctgcacccaggccgtagcgatcatgcatccacaaaatccggtttaacacggaatggtgctccaccattacacccttcggttttccagtggaaccggaggtgtagatgacataggcgacatgatgcggcccagccaggggctccagatttgaaccatcttcgtggtaaatattcttgccagcctgctcctgacgatctagcaccagcacctgaccgtcgaaactccgtgatgcttgctccgccagatgcgattgcgtcagcaccagcttcgcgcctgaatcctccagcataaagcggatgcggtcggccggatattccggatcgatcggtacataagctccgcctgctttgaggatcgcatagatacctacgatcatgtccagcgaacgatggaccagaatgcctacaggctgatcgggttcaaccccttccgcacgcagcgtccgagccaaacggttggttcgctcgttcagctcacggtaggtcaacatctccgacccgaatattaccgctgcctgatccggtgtaattgctgcctgctgctcaaacagtgcgcttagcgtttgatcctgtggataggctgccgccgtatctccccacacctgaatgatctgtgcctgttcttctggtgtcaccaattccagctcattcacacggatatgcggattgttcacgatttgctcgatgacatgcagtacatgtccctgcatccgctcgatcgtagaccgatcgtacacattcgcgttgtatctgaacatgatgcggaaggtgtcatccggcatcacaatcaagtccagatcatagttcgtctgctcaacaacctctacattcgtaatgtcaaatgcagacggacgaacttcacccaactgctcgacttgctcctctaccgggtaattctcaaataccataatgtgattaatcagattttgcttttgctcggtcagcgcctggatttcatatagcgggaagctgtcatatactcccgaagccaacgcttgctcctgcgtgttccgcatgatgtccacaaacgtggcattccgctcactttgaatccgaaccgggatcgtattaatgaacagaccgatcatattttctacacccgcaatatccgtcggacgtccagatacgacactgccgaatacaacatcctcattgttattatatttctgcaaaatcaggccccacacgctctgcatcagcgtattaatcgtgacctgctgctgcttggcaatccggtacatggcttcgctccacgttggatccagatctaccgttactttttcagaaacatattcgctggcttcgcttgctgtcgaggataccgcatgttccctgctgtccgtcacgtggtctttcgatgcagtatccgatcctggcaacaacgtctgctgttcaaagcccgccaaatagctgctccaatactcttttgccgcacgttcatcctgacgctccagccattcaatatattggccatacggtgtgatcggagccagctccggctgtttctgctccagcagcgcaaagtacgtaccaaacacctcacccgtaacgagcgataagcaccagccgtccatgataatgtgatggaagctccagacccagtgatacgtttcttcatcggtctgccatacctgtacgcgcatcagtgcatccgtaccgagatcaaagccccgagcctgatcctcctgcttcaacgcctggatatacgcctgttgttctgctttccgcattccgcgtacatccttgtaggaaaggtcgctatctttgtgacggaatacaatctgcaatggctcctgaccatgtccggtctcaaaccgatagaaattcgtccgcagcgcttcatgacgctgtgtcagcagatccaggctctgacggaaaatagcaacatcgaagctgcctttttgatcaaacgatgcttgctggaagtatgcgcctgagtctggctccatcaagctatggaacagcatccctttctgcatgggagaaagagcatacacattttccagttcgcccacagaagccgtttgctccgtcaattgctccagttgttccaacgacaagcctttgaacaagacatcgcttggcgttagttcgctccgctcttgggaggcacaatgcttgattacttcctgcaagctttcccgtagcaactgcgcaaatttttctacgttttgctgatgatatacttggctgtcatagcgaatttccagtgtcagcacgcctgctgtaatcatgccgttcacattcagcggctgctccagcacggtataaccactcatcggctctccgtccgtatgcgaagacagcacgatgtcactctgttccaaatcctgatcaaattgtcccaaatagttaaagctgatctctggctgcaggctccaggaagaggtagcatcatccgaagacatatacttcaaaataccgtagccaatgcccttatgcggcacatgacgcaggtcctctttgacccgcttgatgcgctgccctacttccgcctttccatcgacatccagcagcaccggatactgactcgtaaaccagcccacggtacgtgtgatatccacatctggaacaatagcctcccggccatgtccctccagattgaccagcacacgctcctgaccgctccagttgtacaatgcgctgccgagtgcggttaacagcaaatcattgacctccgtattgtacgcacgatgtgattcctgaagcagcaaccgggtttcctgttcgttccaagccacggtcaccgtctcactatctctgacccaaaaaggctgtcctgctgctttgtcttgatccttaggtagcgatgcgactgccatgtgagcaagacgctgccagtattcgcgttcgttgtcaatggccggactgttcgcatattgagacaaccgctctgcccaagcagagaacgaatccgttttataaggcaagcgaatcgcttctccccgaatggcctgttcatatccagtcgcaaaatcttcaaacacaatccgccatgagatcccgtctataaccaaatggtgaatggcaatcagtaaatgatctccatccatgcagcggaagagtcccagcttcaccagcggtccttcatccagatgaatagagctttggatggcattggctttcatctcaatcgccatcatcacatctgccgtatcttcgacgcctgtcaaatctacaacgtccagatgatacagctcgccttcgttcacaccgcgattccacgcttcatagccctgttcggtctgacggaagaccatacgcaacgcatcatgatgctccgtcacctgggtcaccgtgcgatgcaatgcatctatatcaaagccttctgctcgatgcagcatcaccgactggttgaaataatgcggctctgccgacgatagtccaaaaaaccactgctggatcggggtcagcttgacgctgcccgaaacctcgccctgatcggccgtacgactaactgggtgtacatgaccactcagcagcgaaatggatggatattggaacaaatccttcatgtccagcttgtagcccgcttgcagcaagcgggaggatacctggattgctttgatcgaatcgccgcccagatcaaagaaattatctaaaataccgatgttcttcgttcctaatacagactgccaaatcgaagccaacgtctgctccagcgctgtgcgcggctctacataatccgctccgctttgcagactgccttccggtgccggcagggccttacggtcgattttgccgttcggtgtcagcggcatctgctccagctggatgaaatacgaaggcaccatgtagtttggcagctcctcacccaggaagccgcgcagctccccagcgcttacgtctctttcagcgacatagtacgccaccagttggttttgtccctgctcgtccgcttgagccaggacgatgacttcttgcacgttttccactttcaacatttgtgcctcgacttcgccgagttcgatccggtagccccggattttcacctgatggtcgatccggcccaaatattcaatgttgccatcaggcatccatctcgccaagtcccccgtacggtacattcgttcatagcctgcttcacccgccgcaaacgggttcgctacgaatttctccgccgtcagctctgggcgatccagataaccacgcgccagacccggaccggacacgcacagctcacctgctacgccgaccggcgccaaatgtccatgcacatccaccatgtatacccggtgattcggcacaggacgtccgatggaaatgagttgtcctgccctttcatcctcggataccggccagatggatgttgccaccgagttttcggttggaccatagccattgtagtacgccacctgatccttccacttgtataccagttcggtggatgaggctgaacccgcagtgaacagaatacgcaggtgcggcatccgccccggctccaaatacactgcataagttggcggcaaagcagccaccgtaatgtggtgatccgccatatattgctcaaaccgttcgtagttcaaaatcgtctctgttgttggcacgtataacgtagccccgcagaacagcgcctggaagatttcccagcaagccgcatcaaacgagtagctggcaaatagcagcgcatgatccgacgcacgaatcttgagcgtctgatcaaaatacgttttcagattgcacagcccgtggtgctccagcatcacgcccttcggctgcccggttgtacctgacgtgtagatcacatacgccaaatcgtttggaccagacagcggctccaggttggaaccatcctcgtggtacaccgattgttccccatccaataccagcacttgaccgtcgataacggctttgtccaccagatgactttgtgtcaatagcagcttcgctcccgagtcatccagcatatagcggatacgttcctccggataggttggatcgataggaacataggcgcctccggcttttaaaatcccgaagatgcccacaagcatgtccaccgaccgctcggtcatcagacccaccaaacgatctttcgtcacgccttgactgcgcaaggtacgcgctaatcgattggcgcgttcattcagctcgcgataagtcagctgctctccttcaaagaacaaggctgtctgctctggcgtctgcgcggtttgcgcctcgaacaagccgtgaatcgtttgctcgcttgcataggctgccgctgtattgccccacacctcaacgatttgcttacgctcctgcatcgtaaccatgtccagttcatgtacgcgaatgttcggattcgctgtcacctgctccagtagctgcaccagatgacctcgaatttgctccacactttcccgttcaaaggctagggcattatagccaaagctcatgtgaatggtattccccggcagcactaccacgttaaagtcatagttggtctgctcgacagactcggctcctgtgatcgtgaagctggacgcctcactactacctaattgctcgatttgttcctctaccggataattttcaaaaataagaatatggttgatcaaatcctgcttaagctccgacagcccctgaatttcatacaacggatacgtatcatacacatgggaagcaatcgattgctcctggatgtgcttcatcacgtcggagaatacgctgtccacctgactgcggatacgcaccggaatcgtattgataaacagaccaatgatatgctccacattcggaatgtctgccggacgtccagatactacactgccaaacacgacatcatcggtgccattatatttttgcagcaaaaggccccaaacggtttgcatcaacgtattgatggtgacctgataacgcttggctatgcgctgaataccagctgtgaggtctgcgcccaaatcaaaatccaaacgctccgcctgataccccgtcttaccctgaatttttgcctgtggcaaacgggactgctcctcatatccttccagaaccttgctccagtagcttgatgcggcctgacgatcctgctgttccagccattcgatatattgactgtacggcgttacaggggccagttcaggttgtttatgagccagtatcgcaaaataactcgcaaacacttcgttggtcaccagcgacaagcaccagccgtccatcacgatatgatggaagctccatacaaaacggtacgattcctcacctgtgcgcaaaacagccacacgcatcaaaacatcctgcgccagatcaaagcctctttgcttgtcttggcgcgtaaattcgaggatgtactcgttttgctgctcgtcctccatgtcccttaaatcttcaacatacagttcgctgcgcttattccggtacacgacctgaagcggttcatccttccagccgctgtagaagttcgtgcgcagtaccgtatgccgctgcaccaagacatccaaactggctgcaaaggcagcgatattaaaatgtcctcgcagatcaaaggaggcctgttcaaaataagctcccgattgcgaatccatcagattgtaaaagagcatgcccttctgcatcggcgtcagtgcgtatacattttccagctcaccgatacgtgccgcctgttccgcaatctgttccagctcaccagtcgtcagacctttgaaggatacatcacttggggtaagctctggccgctcctgagcgacgcaatgcgtaatgacctcctgcaaagcggatttcattagccccgccactcgttccagcgtttctttacgatactgcttacggctgtaagcgatcgtcaagcgcagcttgccttctgagatcattgcgttcaaatccagcgtgtacagtaacggtgaatgggcatcctctgtctcccctgcacggtaggaggacaacgtaattccactgttttgcagatcctgatcgacctgccccaaatagttaaagctgatttccggttcggctgcgatcgtatccatttcatctgcaggcaacgcagaggacaggtaacgccaagtgccataggtcagccctttatgcggaatgcgccgcaagccttccttcgtttctttaatccgctctgccagtgtcatttccttgccggtctccagcagcactggatacaagctcgtaaaccagcctactgtacgtgtaatatccacctctggcaagatcgcttcccgaccatggccctccaggttcaccagtacatgtcctgcacctgtccagttgtgcaccgcgagtcccagcgcggtcagcagcaaatcattgacctcggtgttataggcgcgatgggcctgcttcaacagttgctcggtttcagcttcagtccactccaccgttagcacttcgctgtctgcattcacggagccctcataggcaaaatccttaggcagtggtgcagcttcagctttgacctgttccagctgcttccaatagacttcatccgatacagcctcaggacggttagcataagaggataactcccgtgcccacgtttggaaggaatctgttttatagggcaatcgtacaggctcgccctggatcgcctgctcgtagcctgtcgagaaatcttcaaacagaatccgccacgacaccccgtccaccaccaagtggtgaatagcgatcagcagatggtcgccctcggttgtgcagaacaatccgagtttcaccaagggtcctgcggacaggtccatgctgctttgaatttccattgccttcgcttccagcgcttccgcataagcggcccgttcacggtaatccaaagtttccagtgtatataacgtgccttcctctacatggcgagtccaagctgtataaccagcggaagtctgatggaataccgtacgcagcgcatcatgatgcttcacgaggtgatccatggcttggcgaaccgctgtctcatcaaaaccctcggcgcgatagagcataaccgcttgattaaagtgctgcggacgctcgcgctcctgcgcaaagaaccaatgctggatcggaagtagcgccgtttccccgctgacttcttcctgatctgccatacgacggacctcttgcatatgcggtgccagggcttcaacggttggatactggaacaaatccttcatgtccagcttatagccggcctggaacgcacgggaggcgatttggatcgccttgatcgaatcaccgcccaggtcgaagaaattgtccagaataccgaccgtctgcagccccagtaccgactcccagacggctaccaaagcgcgttcttgcgccgtacgcggctcggcataatcgactccggtttgcaggctgccctctggtgcaggcaaggccttgcggtcgattttgccattcggtgtcagtggcagctgttccagttgtacaaagtaggatggcaccatgtagcctggcaactcccgtcccagctcacttcttagcttgctggcctcgacttcttgtcccgcgacatagtaggccaccatgtggttttggcccatttcgtccatacgggccacgacgaccgcttcgcgtaccgattccacctggagcagctgcgattcgacctcgcccagctcaatccgataacccctgattttcacctgatgatcgatccggcccagatattcaatgttgccgtccggcatccatctcgccaaatcgccggtgcggtacatccgttcatagcctgctttgcctccggcaaacgggttctctacaaatttctcggccgt

SEQ ID NO: 416 - DNA, 19923 bp, Paenibacillus polymyxa
  source 1..19923: mol_type = genomic DNA
  misc_feature 1..19923: note = strain LU17007 mutant with genomic deletion
gcgatgctccagcataacccctttcggctgtcccgtcgtacctgacgtataaatcacatacgctagatcgttcggaccagacaacgactccagattggaaccatcctcgtgatgcacactctccgccccattcagcaccagcacctgaccgtcgaaagctactttgtccaccaagtggctttgcgtcaacaacagctctgctcccgagtcatccagcatgtagcggatacgctcctctggatatgttggatcgattgggacatatgcgcctccggctttcaaaattccaaagatgcccacgatcatgtctaccgaacgctcggtcatcagacccaccagacgatccttcgtcacgccttgactgcgtaaggtacgagccagacgattcgcacgttcattcagctcgcgataggtcaactgctctccttcgaagtacaatgctggctgttccggtgtctgcacggcttgtgcttcgaacaagccatggatcgtttgttcgcttggatactcagcggctgtatctccccatccgtggagaatttgctcgcgttcctgctcgcttaacacatccaactcctgcacttgaatgtccgactgcgctaccacctgctccagcagctgtaccagatgaccctgcgtccgttccaccgcttcccgatcatataacttcgcattgtattcgaatcggattttcatcgcttcctgcggcatgacgaccagattgaaatcatagttggtttgctcaatcatccctgcattgctgatgacaaaatccgattccgcaccttcgccaagctgctcgacctgctcctccaccggatagttttcaaacacgataatgtgctggatcagctcttgcttttgctcggtcaaggcttgaatttcatacagcggatacgtttcgtaatcttgagaagccagcgcctgctgctgattcgctctaatcaggtcggcaaaggtgtcctcagccttactacggatacgtactggaatggtgttaatgaacaagcccaccatgttttcgatccctgaaatatctgccgggcgacccgatacgacaccgccaaagacggcgtcgttactaccgttgtacttttgaagcagtaagccccatgccgtttgtaggagcgtattggtggtcacgtgatactgcttggctaccatttccatacgtttggtcaagtcttggcccagatcgcacagcacatgctcaaattgttcaccctcggctttcgcgcctactttgccggttggaatcgacgtttgctgatcatagcccagcaaatattccttccaatatgaagcggctgctgctacatcttgagcttccagccacgcaatatactgactgtatggagtcacaggggcgagcttcagtgctctatgctctacggctgcaaaataagcctcaaacacctcatccgtcaccaacgccacacaccagccgtccatcaaaatatgatgagagctccatacaaaataataatcctcatcacctgtccgcaaaatcgccacgcgcatcaacgcatcccgggataaatcgaatccagctaccttgtccttacgaataaattcctgcacatacgcgtcgcgttcctgatcttccaaatgacgcaaatcctcatatctaaaaccaacctctttatggcggaaaatcacctgtacgggctcatcctgccagccgctaatgaaattagctctaaagatctcatgccgctgcgccagctgattcaagctatcttggaaaatatccgcttggaaacgtccgtgtagatcaaaggtcgtttgttcaaaataagcccctgattctgcatccatcagactatggaacaacatccctttttgcatcggtgtcaaggcatatacattttccagttccccgatgtcacgcgtccgttcgaccaactgatccagctcggccaaggttacaggtttaagcataacatcacttggcgtcagttcctgctgtttgcgacccgcgcaatgcgcgatgatttcctgcaggctggttctgagcgcttcggctagctgttccatcgtttccttgcgatattcctgatggctgtagctgatcgtcaattgcaattgaccttcggaaatcagtccgttcagatccagggtgtgcgatctggctgcatatgcgctaagctcggcaccgctagcgtaaggagacacgccaatggattgatgttgcatatcctggtcaaattgtccgagatagttaaagctgatttcaggttcggttccaaaatgcgcttgctcacatgctgcagacaggtatctcagcatcccgtagccaatgcccttttgcggaatccggcgtagcccttctttcacctgtttgatgtgctgtgaaaggtcttgccctgcgctcatatccaacacaaccgggaactgtgtcgtaaaccagcccaccgtacgcgtaatatccagctcgggcaaaatggactcccgcccatggccttccagggtgacaagcacgcgttcaatccccgcccagcgatgaatagccgtgccaagtgcggtcagcagcagatcattcatatccgtgttgtaggcacggtgcgcctgttttaacaactgctccgtttcctgagctgtccatgtgaccatcataagctcgctgtctttattcaaggaatgagaaggtgattcgtcttttggaagcggctcataccttccctgttccacgtcttgccagaatgcgagctctgcttccatttctggaccgttcgcatagtgagactgtgcctcggcccaggtacggaacgaatccgttttgtgcagaagacgagccgcttgtccgtgcaatgcctgttcataggctgtcgtaagatcctcgaacaaaatgcgccaggatacggtatccactactaagtgatgaatagccatcaataaatggtctccatctgggcaatggaacagccccagcttcaccagtggtccttcgcttaaatgaatgcccgcctgaatttcatttactttggcctccatcgccgcagacacttcagtctcatggctgaagtctatacgttccagcgtatacagctcaccctcgccaattgcgcggttccaagcttcatatccatgctcggtaaggcggaaaacgatccgcagtgcatcgtgatggctaacgatgtggtccatcgctgtgcgcagggccacttcatcaaaaccgtcctggctatgcagcataatggactggttatgatgatgagcatccgtcaggttctgctcaaagaaccaatgctgaacaggtgtcagtttcaccgcgcccaccacttcgctctgatccgccaatcttgtcaccgattggactttcagcgccaaggcagacaccgtcggatgactgaacaggtctttcatctccagtcgataacctgcttgcagcaagcgggacgagacttgcagggctttgatcgaatcgccgcccagctcaaagaagttatcctgcgtgcctacggcatccacgcccagcactccggcccataccgcagccagtacttgctccaccttcgtacgcggggccacataagctgctcctgtatggatgctgccttccggctctggcaaggccttgcggtcgattttgccgttgctggtcagcgggatggtctccagtcgcatcagacgtgcaggcaccatgtgtgctggcagtccggcttccagctcggtctgtacttcctccatccgcagctcggcttctcccgtgatgtatccacacaaatacttgtgtccacgctcgtccatccggtcgatgactacggcttgacgcacacctggcacccgctggatcgccgtttcaatctcgcccagctcaatccggtatccccggattttgacctggtagtccatccggccgataaagtccacattgccgtctggcatccaccgcgccaaatcgcctgtgcgatacaaacgttcccccggtacgtacgggttcgctacgaatttctcggctgtcaggtccgcacggttcaggtagccccgtgcgaccccgatgccgccgatgcacagttcgcccagtacgccgatcggcaccggattcagctggctgtccacgatgtagaagcgtgcgttcagccatgcctggccaatcggcacatggccgctgcttggcagcttcgatagttcttcgtcatagaagctggagtcaatcgccgcttcggtgacgccgtagctatttattatgcggatattcgcaccaaatcgttcttgcagcacccggtaatccgtcacgctgcagctgtccgagctggtgatcagcagttccagactgctcatgtcaaggccctgttcatgcacatgctgcataaacggtacgatcagggctggagtcgattcgaacacggtaatctgataatcgcgaatccatccgtacagacggcttggatcaatgcggtcgtctttcggacaaataaccatcgtgcccccgttatagagcgtccgtgcaatatccccgacgaacacgtcgaaggagaagctggctagttgcagcagtcgtaccgggaactggttcagacggtaatcccggcgatacgctgcagccgtattcaccaagctgcgatgctcaatcatgacgcccttcggacgtccggttgtgccagaggtgtaaatcacatacgccagatcgtgcggttcattgatcggttcaacatccgtcgtatccccggtatacagcgactcatcgtccaatgccagtacggtatgcagacgcagccctgttgctgattcggatgctgcttcgctgtcagacttcgaatctgctgttccatttaggtttccatgaagagcacctgattccatcgtttcagcgccagccgctgtttccagctcaccctcagtctgcccttcgaccaaggcctgatcgcttttctccagccatgcctgggcacgctcctgcaaactggtttgcgtgagcagcaccgtcgcaccgctatcctccagcatgaaacgaatgcgttcggacggataatctgcatccagcggcacatatgcgcctccagccttccacaccgccagtacgccgaccagcatgtttaccgagcgttcactccaaatgccaacaatcgactcgcgtccgataccttcatttcgcaatctacgcgccaattgatttgcacgttcattcagtgtgcggtacgtaagctgttgctcctcgtacaccaccgccacatgatccggtacaagctgggcctgttcttccacgtaggtatggaacagtgctcctgcttcaaccgcagtaacatctgatacgcctacatctccaaaaccatagaggatttgtgctttttcctcgacagttaccatatccaaagcggccagtggctgctttggatgcagtgtaatggctcgtacgagttcagtaaaatgctgtgcaaagcgcgcgatggtctcaggtttgtacagcgccgtgctgtattccagactgcacagaatgccttctggctgctctacagcatccaaggtcaaatcaaatttggacgtatgaacgtccgtcggatacggcttaaagatcagcccttccagctcgaactcctgctgctcaaatgttttcaattcaaacatcgtatcaaacagcgcattccggctcgtatcccgcgttacattcagcttttcaaccagctcctcaaacggatattcctggtgctcatacgcactgagcgcatgctctttgacctcttgcaagtagtccaggaacgttttgtcaccagacggataattacggatcgccagcgtgttcaggaatacgcctactaggctactgagctccgcatgtggtcttccggcaatcggcgtgccgacgatgatgtcctcttgacccgtgtatttatgcaagagtgtgctatacgctgcaagcaataccatgtacaaggtggatccggtttgcgcggccagctgcttcaactgctcgctgtcctccatgcagatcgcaaactcaaatcgagttccttccagacgctgtacggcgggtcttgtaaaatccgttggcatatccagtgccggaatttcaccagacatggtgttcagccaatagctttcttgcgcacgaagacgttcactttgcatatctgcatgctgccaaacggcatagtccttgtactgaatacgcagtggcgggagctccttgccttcgtacaattgagagaactcctgcacgataattccttccgtgacgccatccgaaataatatggtgcatgtcatagagcataacgtgacgccccggtccgttttcgatcaactgaactcgcagcaacggggcttgtgcgagatcaaaggcacgtacaaagtcctgtgcgtactgcggtgtctcttcttcgcttgcttgcacatactccacgctgaatgggacgttagattcaatccgctgaatcacctcgccatccaccatctcgaatcgggttcgcagggtttcatgacgggcaatcagctggcggaaggcttgttccagtcgctctttatccaaggagccttcgataatcaaagctcccggcatgttgtagctcacctctccaccttccaggtgactcagcacgtacatccgtttttgcgccgaggaaacgggataatagtcgcgctcctccgccacaggtatggatacatacgtttgctgggtctgatcttcacccatcacctgtaccaattgttcaattgtcggatattggaaaatatctcgcaaggccagcttgtgattcagctcctgatggattttcgccatcagggtggtggcacgcagtgaatgtcctcccacttcaaagaagttatcctggatgcctacccgctgatgattcagaacgctttgccaaatacgtaccagttgctcttccagctctgtccgcggcgcaacatactccgtgcctccttcgaggcgagcttccggtgctggcaacgctttgcggtcaattttcccgtttggtgtcagcgggaattgatccagtggtacgacatacgtcgggatcatatagcccggcagtttgggctggagtgtgctgcgtagctccggcaaattcagcgcctccgaggctacgacatacgcgcacagatctttgtctccgttttcgttttcccaggcggtgacgatggctttctcaatgccatccacagtcagcagttgcgcttccacctcgcccagttcaatccggaagccccggattttgacctgatcatccattcggccgataaagtctacattgccgtccggcatccaccgcgccaagtcgcctgtgcggtacagtcgttcgcccggtacgtacgggttcgctacgaatttttccgccgtcaggtccgcacggttcaggtagccccgtgcgaccccggctccgccgatgcacagctcacccagtacaccgatcggcaccggattcagctggctgtccacgatgtagaagcgggcattcagccatgcctgaccaatcggcacatggccgctgcttggcagcttcgacagctcttcgtcatagaagctggagtcaatcgctgcttccgtgacgccatagctgttgatgatacggatatttgcaccaaaccgttcttgcagcactcggtagtccgttacgctgcaactgtccgagctcgtgatgagtagcttcagactgctcatgtccagtgcttgttcatgcacatactgcataaacggtacgatcaaagctggagtcgattcgaacacagtgatttggtagtcacgaatccagccatgcagacggctaaaatcaagtcggtcgtctttcggacagatgaccatcgtgcctccgttatagagcgtccgcgccatatccccgacgaacacgtcgaaggagaagcttgccagttgcagcagtcgtactgggaactcgctcaggcgataatcccggcgatacgccgcagctgtattcaccaaactgcgatgctcaatcatgacgcccttcggacgtccggttgttccggaggtgtagatcacatacgccagatcctgcggttcgttgatgtgatcaacgtctgtcgtatctccggtgtacagtgactcatcgtccaatgccagcatgatttgcagacgcagctttgttgccgattcagatgctgcttcgctgtcagacttcgaatctgatttcaagctcaaaccttcattcaggttgtctctttccatcgtttcagcgctaaccgccgtctccagctcacccttagctttttcatcgccccaagtccattggctttcattcagccatgcttgtgcgcgctcctgcaatcccgtctgggtcaacagtaccgtcgcaccactgtcctccagcatgaaacgaatgcgctcggacggatagtctgcatccagcggcacatatgcgcctccagccttccataccgccaacacaccgaccagcatgtctaccgagcgctcactcaaaatgccgacaatcgactcgcgtccgataccttcatttcttagtctgcgcgccaattggttcgcacgctcgttcagtttccggtacgtaagctgttgctcctcgtataccaccgccacatgatctggtataagctgggcctgttcttccacataggtatggaacagggctcctactccaaccgcagcaacatccgttacgcccacttctccaaaaccgtagatgagttgctcttgttcctcatcggttaccatgttcaaaactgccagtggctgctgcggatgataggcaatcgctcgaacgatttccgcaaaatgctctgccaatcgcgtcatagtctcccgcttgtacagcgctgtgctgtattccagactgcacagaatgccttccggttgctctatcgcctccaagctcagatcgaatttggctgtgtgattatccagtggataggagctcaaggtcagccctttcagctcgaactcccgctgctccaacgttttcaattcaaacatcgtgtcgaacagcgcattccggctcgtatcccgggttaaattcagtttttcaaccagctcttcaaacggatagtcctgatgctcatacgcacgaagcgcatgctctttgacctcctgcagataatccaggaacgatttgtcgctggacggataattgcgcatcgccagtgtgttaatgaatacaccaaccaaactctccagttcggcatgcggtcgtccggcaattggcgtaccgacaatcatgtcctcttggcctgtgtatttgtgcaagagtgtggtgtacgccgccagcatcaccataaacagggtagagccggtctgggcagccagttctttcaggcgttcactatcctcacgctccagtacaaattcgaccgtatcccctgctgtactctgcaccgctgggcgggcaaagtccgtagagagatccagtacaggcagttcaccttggaaagtgctcagccagtacgcttcctgacgctgcatccattcctgatgggcttcgctttgctgccatacggcataatccttgtattgaatccgcaatggcgccagctcttcaccgccatacaaacgaacaaactcatcagtcaggacctccagggacaccccatctgagacgatatggtgcatatcgagcataagcagatgttgggattcctgttctactccttgaacgcccagatccaccaaacctactcgcagcagcggtgcagctttgagatcaaacggacggacaaagcgccgcaccagctgttgcgcctctatgttgaccctggtgtacgtatctgtagttgtgtcctgatctgtatccgcaatcacatcttctgcctgtaccttcgtatattccacctcgaatggcacggtgtcctcgatccattgcatcggctcattgtccaccagctcaaagcgagtacgcaaggtcgcatggcgggcgatcagttgacggaatatatgttccactcgtttcacgtccagcggaccgctcacttgcagcaccgacggcatgttgtagttcacatccagcggatcgaactgatgcagcacatacagtcgtttttgcgccgaggacagtggatagaagctacgctcttccgttaccggaatggacgcatacgccacctgatccagaccttccagcacagccgccagttgttcaatcgttggtgcttcaaaaatactgcgcagaggaagctgcttgttcagctcttggtgaatcttcgaggttagtgtcgtcgcccgcagcgaatgtccgccaatttcgaagaagttttccttcacgccaacttgcgccaggcccagcacatcctgccaaatttgcgccagcttcacttccacccacgtccgcggcgggacataatcggctccgctttgcaggctaccttccggtgctggcagtgccttgcggtcgattttgccattgggactcagtggcatctgctccagctgtacaaagtacgatggtaccatgtagcttggcagctcctgccccagcgcacttctcagctcgctggcactgatttcttgcccggcaacatagtaggccaccatgtgtttttgtcccgtttcgtccgcacgagccatgaccacggcttcgcgtaccgattccacttggagcaactgcgtttcgacctcgcccagctcaatccggtacccccggattttcacctgatggtcgatccggcccagatattcaatgttcccgtccggcatccatctcgccaaatcgccggtacggtacatccgctcataccctgcttccccgccggcaaacggatcagctacaaatttctcggccgtcagctctggacggttcagatatcctcgtgctacgccgacaccgccgatgcacagttcccctgccacgccaattggctgcaattgctccgtgccttccttgacgatgtacagacgaatgttttgaatcggtttcccgatcggaataaccgaataggctccatcaggctcgcaatcgaagtacgatacgtccaccgttgcttcggttgggccatacaggttgaccagcttcgctccggccaggctcgacacgagccgctggtaccgggccacatgctgtggcggcaatgcttcgccactggcaaagacatggcgcagtgtgcccagcttcgcttgcatcacttctcgtggctgctgttccacatactccaggaacgcatgcagcatggctggaacaaagtgcatcgtgctcacgccatcgcgggcaatcgtgtcgacgatgtcttccgggttcttttccccgccgaccgacagcaggcttacctttgagccgaccatcgaccaccagaacagctcccacaccgacacgtcgaaggtgaaggcggtcttttgcaggatcgtatcttctgcacccaggccgtagcgatcatgcatccacaaaatccggtttaacacggaatggtgctccaccattacacccttcggttttccagtggaaccggaggtgtagatgacataggcgacatgatgcggcccagccaggggctccagatttgaaccatcttcgtggtaaatattcttgccagcctgctcctgacgatctagcaccagcacctgaccgtcgaaactccgtgatgcttgctccgccagatgcgattgcgtcagcaccagcttcgcgcctgaatcctccagcataaagcggatgcggtcggccggatattccggatcgatcggtacataagctccgcctgctttgaggatcgcatagatacctacgatcatgtccagcgaacgatggaccagaatgcctacaggctgatcgggttcaaccccttccgcacgcagcgtccgagccaaacggttggttcgctcgttcagctcacggtaggtcaacatctccgacccgaatattaccgctgcctgatccggtgtaattgctgcctgctgctcaaacagtgcgcttagcgtttgatcctgtggataggctgccgccgtatctccccacacctgaatgatctgtgcctgttcttctggtgtcaccaattccagctcattcacacggatatgcggattgttcacgatttgctcgatgacatgcaatacatgtccctgcatccgctcgatcgtagaccgatcgtacacattcgcgttgtatctgaacatgatgcggaaggtgtcatccggcatcacaatcaagtccagatcatagttcgtctgctcaacaacctctacattcgtaatgtcaaatgcagacggacgaacttcacccaactgctcgacttgctcctctaccgggtaattctcaaataccataatgtgattaatcagattttgcttttgctcggtcagcgcctggatttcatatagcgggaagctgtcatatactcccgaagccaacgcttgctcctgcgtgttccgcatgatgtccacaaacgtggcattccgctcactttgaatccgaaccgggatcgtattaatgaacagaccgatcatattttctacacccgcaatatccgtcggacgtccagatacgacactgccgaatacaacatcctcattgttattatatttctgcaaaatcaggccccacacgctctgcatcagcgtattaatcgtgacctgctgctgcttggcaatccggtacatggcttcgctccacgttggatccagatctaccgttactttttcagaaacatattcgctggcttcgcttgctgtcgaggataccgcatgttccctgctgtccgtcacgtggtctttcgatgcagtatccgatcctggcaacaacgtctgctgttcaaagcccgccaaatagctgctccaatactcttttgccgcacgttcatcctgacgctccagccattcaatatattggccatacggtgtgatcggagccagctccggctgtttctgctccagcagcgcaaagtacgtaccaaacacctcacccgtaacgagcgataagcaccagccgtccatgataatgtgatggaagctccagacccagtgatacgtttcttcatcggtctgccatacctgtacgcgcatcagtgcatccgtaccgagatcaaagccccgagcctgatcctcctgcttcaacgcctggatatacgcctgttgttctgctttccgcattccgcgtacatccttgtaggaaaggtcgctatctttgtgacggaatacaatctgcaatggctcctgaccatgtccggtctcaaaccgatagaaattcgtccgcagcgcttcatgacgctgtgtcagcagatccaggctctgacggaaaatagcaacatcgaagctgcctttttgatcaaacgatgcttgctggaagtatgcgcctgagtctggctccatcaagctatggaacagcatccctttctgcatgggagaaagagcatacacattttccagttcgcccacagaagccgtttgctccgtcaattgctccagttgttccaacgacaagcctttgaacaagacatcgcttggcgttagttcgctccgctcttgggaggcacaatgcttgattacttcctgcaagctttcccgtagcaactgcgcaaatttttctacgttttgctgatgatatacttggctgtcatagcgaatttccagtgtcagcacgcctgctgtaatcatgccgttcacattcagcggctgctccagcacggtataaccactcatcggctctccgtccgtatgcgaagacagcacgatgtcactctgttccaaatcctgatcaaattgtcccaaatagttaaagctgatctctggctgcaggctccaggaagaggtagcatcatccgaagacatatacttcaaaataccgtagccaatgcccttatgcggcacatgacgcaggtcctctttgacccgcttgatgcgctgccctacttccgcctttccatcgacatccagcagcaccggatactgactcgtaaaccagcccacggtacgtgtgatatccacatctggaacaatagcctcccggccatgtccctccagattgaccagcacacgctcctgaccgctccagttgtacaatgcgctgccgagtgcggttaacagcagatcattgacctccgtattgtacgcacgatgtgattcctgaagcagcaaccgggtttcctgttcgttccaagccacggtcaccgtctcactatctctgacccaaaaaggctgtcctgctgctttgtcttgatccttaggtagcgatgcgactgccatgtgagcaagacgctgccagtattcgcgttcgttgtcaatggccggactgttcgcatattgagacaaccgctctgcccaagcagagaacgaatccgttttataaggcaagcgaatcgcttctccccgaatggcctgttcatatccagtcgcaaaatcttcaaacacaatccgccatgagatcccgtctataaccaaatggtgaatggcaatcagtaaatgatctccatccatgcagcggaagagtcccagcttcaccagcggtccttcatccagatgaatagagctttggatggcattggctttcatctcaatcgccatcatcacatctgccgtatcttcgacgcctgtcaaatctacaacgtccagatgatacagctcgccttcgttcacaccgcgattccacgcttcatagccctgttcggtctgacggaagaccatacgcaacgcatcatgatgctccgtcacctgggtcaccgtgcgatgcaatgcatctatatcaaagccttctgctcgatgcagcatcaccgactggttgaaataatgcggctctgccgacgatagtccaaaaaaccactgctggatcggggtcagcttgacgctgcccgaaacctcgccctgatcggccgtacgactaactgggtgtacatgaccactcagcagcgaaatggatggatattggaacaaatccttcatgtccagcttgtagcccgcttgcagcaagcgggaggatacctggattgctttgatcgaatcgccgcccagatcaaagaaattatctaaaataccgatgttcttcgttcctaatacagactgccaaatcgaagccaacgtctgctccagcgctgtgcgcggctctacataatccgctccgctttgcagactgccttccggtgccggcagggccttacggtcgattttgccgttcggtgtcagcggcatctgctccagctggatgaaatacgaaggcaccatgtagtttggcagctcctcacccaggaagccgcgcagctccccagcgcttacgtctctttcagcgacatagtacgccaccagttggttttgtccctgctcgtccgcttgagccaggacgatgacttcttgcacgttttccactttcaacatttgtgcctcgacttcgccgagttcgatccggtagccccggattttcacctgatggtcgatccggcccaaatattcaatgttgccatcaggcatccatctcgccaagtcccccgtacggtacattcgttcatagcctgcttcacccgccgcaaacgggttcgctacgaatttctccgccgtcagctctgggcgatccagataaccacgcgccagacccggaccggacacgcacagctcacctgctacgccgaccggcgccaaatgtccatgcacatccaccatgtatacccggtgattcggcacaggacgtccgatggaaatgagttgtcctgccctttcatcctcggataccggccagatggatgttgccaccgagttttcggttggaccatagccattgtagtacgccacctgatccttccacttgtataccagttcggtggatgaggctgaacccgcagtgaacagaatacgcaggtgcggcatccgccccggctccaaatacactgcataagttggcggcaaagcagccaccgtaatgtggtgatccgccatatattgctcaaaccgttcgtagttcaaaatcgtctctgttgttggcacgtataacgtagccccgcagaacagcgcctggaagatttcccagcaagccgcatcaaacgagtagctggcaaatagcagcgcatgatccgacgcacgaatcttgagcgtctgatcaaaatacgttttcagattgcacagcccgtggtgctccagcatcacgcccttcggctgcccggttgtacctgacgtgtagatcacatacgccaaatcgtttggaccagacagcggctccaggttggaaccatcctcgtggtacaccgattgttccccatccaataccagcacttgaccgtcgataacggctttgtccaccagatgactttgtgtcaatagcagcttcgctcccgagtcatccagcatatagcggatacgttcctccggataggttggatcgataggaacataggcgcctccggcttttaaaatcccgaagatgcccacaagcatgtccaccgaccgctcggtcatcagacccaccaaacgatctttcgtcacgccttgactgcgcaaggtacgcgctaatcgattggcgcgttcattcagctcgcgataagtcaactgctctccttcaaagaacaaggctgtctgctctggcgtctgcgcggtttgcgcctcgaacaagccgtgaatcgtttgctcgcttgcataggctgccgctgtattgccccacacctcaacgatttgcttacgctcctgcatcgtaaccatgtccagttcatgtacgcgaatgttcggattcgctgtcacctgctccagtagctgcaccagatgacctcgaatttgttccacactttcccgttcaaaggctagggcattatagccaaagctcatgtgaatggtattccccggcagcactaccacgttaaagtcatagttggtctgctcgacagactcggctcctgtgatcgtgaagctggacgcctcactactacctaattgctcgatttgttcctctaccggataattttcaaaaataagaatatgatggatcaaatcctgcttaagctccgacaacccctgaatttcatacaacggatacgtatcatacacatgggaatcgatcgattgctcctggatgtgcttcatcacgtcggagaatacgctgtccacctgactgtggatacgcaccggaatcgtattgataaacagaccaatgatatgctccacattcggaatgtctgccggacgtccagataccacactgccaaacacgacatcatcggtgccattatatttttgcagcaaaaggccccatacggtctgcatcaacgtattgatggtgacctgataacgcttggctatgcgctgaataccagctgtgaactctgcgcccaaatcaaaatccagacgctccgcctgataccccgtcttaccctgaatttttgcctgtggcaagcgggactgctcctcatacccttccaaaaccttgctccagtagcttgatgcagcctgacgatcctgctgctctagccattcgatatattgactgtacggggttacaggggccagttcaggttgtttatgagccagtatcgcaaaataacttgcaaacacttcgtttgtcaccagcgacaagcaccagccgtccatcacaatatggtggaagctccatacaaaacgatacgtctcctcacctgtgcgcaacacagcgacacgcatcaaggcgtcttgtgccaggtcaaagcctctttgcttgtctttacgcgtaaattcgagcatgtattcgttttgctgctcgtcctccatgtcccttaaatcttcaacatacagttcgctgcgcttattccggtacacgacctgaagcggttcatccttccagccgctgtagaagttcgtgcgcagtaccgtatgccgctgcaccaagacatccaaactggctgcaaaggcagcgatattaaaatgtcctcgcagatcaaaggaggcctgttcaaaataagctcccgattgcgaatccatcagattgtaaaagagcatgcccttctgcatcggcgtcagtgcgtatacattttccagctcaccgatacgtgccgcctgttccgcaatctgttccagctcaccagtcgtcagacctttgaaggatacatcacttggggtaagctctggccgctcctgagcgacgcaatgcgtaatgacctcctgcaaagcggatttcattagccccgccactcgttccagcgtttctttacgatactgcttacggctgtaagcgatcgtcaaacgcagcgtgccttccgagatcattgcgttcaaatccagcgtgtacagtaacggtgaatgggcatcctctgtctcccctgcacggtaggaggacaacgtaattccactgttttgcagatcctgatcgacctgccccaaatagttaaagctgatttccggttcggctgcgatcgtatccatttcatctgcaggcaacgcagaggacaggtaacgccaagtgccataggtcagccctttatgcggaatgcgccgcaagccttccttcgtttctttaatccgctctgccagtgtcatttccttgccggtctccagcagcactggatacaagctcgtaaaccagcctactgtacgtataatatccacctctggcaagatcgcttcccgaccatggccctccaggttcaccagtacatgtcctgcacctgtccagttgtgcaccgcgagtcccagcgcggtcagcagcaaatcattgacctcggtgttataggcgcgatgggcctgcttcaacagttgctcggtttcagcttcagtccactccaccgttagcacttcgctgtctgcattcacggagccctcataggcaaaatccttaggcagtggtgcagcttcagctttgacctgttccagctgcttccaatagacttcatccgatacagcctcaggacggttagcataagaggataactcccgtgcccacgtttggaagaaatctgttttatagggcaatcgtacaggctcgccctggatcgcctgctcgtagcctgtcgagaaatcttcaaacagaatccgccacgacaccccgtccaccaccaagtggtgaatagcgatcagcagatggtcgccctcggttgtgcagaacaatccgagtttcaccaagggtcctgcggacaggtccatgctgctttgaatttccattgccttcgcttccagcgcttccgcataagcggcccgttcacggtaatccaaagtttccagtgtatataacgtgccttcctctacatggcgagtccaagctgtataaccagcggaagtctgatggaataccgtacgcagcgcatcatgatgcttcacgaggtgatccatggcttggcgaaccgctgtctcatcaaaaccctcggcgcgatagagcataaccgcttgattaaagtgctgcggacgctcgcgctcctgcgcaaagaaccaatgctggatcggaagtagcgccgtttccccgctgacttcttcctgatctgccatacgacggacctcttgcatatgcggtgccagggcttcaacggttggatactggaacaaatccttcatgtccagcttatagccggcctggaacgcacgggaggcgatttggatcgccttgatcgaatcaccgcccaggtcgaagaaattgtccagaataccgaccgtctgcagccccagtaccgactcccagacggctaccaaagcgcgttcttgcgccgtacgcggctcggcataatcgactccggtttgcaggctgccctctggtgcaggcaaggccttgcggtcgattttgccattcggtgtcagtggcagctgttccagttgtacaaagtaggatggcaccatgtagcctggcaactcccgtcccagctcacttcttagcttgctggcctcgacttcttgtcccgcgacatagtaggccaccatgtggttttggcccatttcgtccatacgggccacgacgaccgcttcgcgtaccgattccacctggagcagctgcgattcgacctcgcccagctcaatccgataacccctgattttcacctgatgatcgatccggcccagatattcaatgttgccgtccggcatccatctcgccaaatcgccggtgcggtacatccgttcatagcctgctttgcctccggcaaacgggttctctacaaatttctcggccgt

SEQ ID NO: 417 - DNA, 19926 bp, Paenibacillus polymyxa
  source 1..19926: mol_type = genomic DNA
  misc_feature 1..19926: note = strain LU17007 mutant with genomic deletion
gcgatgctctaccatgacacccttcggctgccccgtcgtacccgacgtataaatcacatacgttagatcgttcggaccggacaacggctccagattggagccatcctcgtgatgcacactctctgccccattcagcaccagcacctgaccgtcgaaagctactttgtccaccaagtggctttgcgtcaacaacagctctgctcccgagtcatccagcatatagcggatacgctcctctggatacgttggatcgattggaacatatgcgcccccagctttcaaaatgcctaacatacccacaatcaagtctaccgaacgctcggtcatcagacccaccagccgatccttcgtcacgccttgactgcgtaaggtacgagccagacgattcgcacgttcattcagctcgcgataggtcaactgctctccttcgaagtacagcgctggctgttccggtgtctgcactgcttgtgcttcgaacaagccatggatcgtttgatcgcttggatactcagcagctgtatctccccatacacggagaatttgctcgcgttcctgctcgcttaacacatccagctcctgcacttgaatgtccggctgcgctaccacctgctccagcagctgtaccagatgaccctgcgtccgttccaccgcttcccgatcatataacttcgcattgtattcgaatcggattttcatcgcttcctgcggcatgacgaccagattgaaatcatagttcgtttgttcaatcatccctgcattgctgatgacaaaatccgattccgcaccttcgccaagctgctcgacctgctcctccaccggatagttttcaaacacgataatgtgctggatcagctcttgcttttgctcggtcaaggcttgaatttcatacagcggatacgtttcataatcttgagaagccagcgcctgctgctgattcgctctaatcaggtcggcaaaggtgtcctcagccttactacggatacgtactggaatggtgttaatgaacaagcccaccatgttttcgatccctgaaatatctgccgggcgacccgatactacaccgccaaagacagcgtcgttactaccgttgtacttttgaagcagtaagccccaggccgtttgtaggagcgtattggtggtcacgtgatactgcttggctaccatttccatacgtcctgttaaatccttacctaggtcgcacagtacatgctcaaattgttcgccgtccgctttcgcgcctacttttccggtcggaatcgaagtttgttgatcatagcccagcaaatattccttccagtacgaggctgctgcttctacatcctgtgcttccagccacgcaatatactgactgtatggagtcacaggggggagcttcggtgctctatgctctacggctgcaaagtaaacctcaaacacctcatccgttaccaacgccacacaccagccgtccattaggatgtgatgagaactccatacaaaataataatcctcatcacctgtccgcaaaatcgccacgcgcatcaacgcatcccgggacaaatcgaatccagctgccttgtcctggcgaataaattcctgcacatacgcgtcacgttcctgatcatccaaatgacgcaaatcttcacatctgaaaccaacctctttatggcggaaaatcacctgtacgggctcatcctgccacccgctgatgaaattggctctaaagatctcatgccgctgcgccagttgattcaagctatcttggaaaatatcgggctggaagcgtccgtgtagatcaaaggtcgtttgttcaaaataagcccctgattctgcatccattagactatggaacaacatccctttttgcatcggtgtcaatgcatatacattttccagttccccgatgtcacgcgtccgttcgaccaactgatctagctcggccaaggttacaggtttaagcatcacatcacttggcgtcagttcctgctgtttgcgacccgcgcaatgcgcgatgatttcctgcaggctggttctgagcgcttcggctagctgttccatcgtttccttgcgatattcctgatggctgtagctgatcgtcaattgcaattgaccttcggaaatcagtccgttcagatccagcgtgtgcgatctggctgcatgtgcgctaagctcggcaccactagcgtaaggagacacgccaatggattgatgttgcatatcctggtcaaattgtccgagatagttaaagctgatttcaggttcggttccaaaatgcgcttgctcacatgctgcagataggtatctcagcatcccgtagccaatacccttttgcggaatccggtgcagcccttctttcacctgtttgatacgttgtgaaagatcttgccctgcgctcatatccaggacaaccgggaattgactcgtaaaccagcccaccgtgcgcgtaatatccagctctggcaaaatggattcccgtccatggccttccaagttgacgagtacgcgttcaatccccgcccagcgatgaatagccaggccgagtgcggtcagcagcagatcattcatatctgtgttgtaggcacgatgcgcttgttttaacaactgctccgtttcctgagtggtccatgtgaccgtcataagctcgctgtctttattcaaggaagatgactgtggctggtcttttggaagcggctcataccttccctgttccacttctttccagaatgagaactctgcttccattgctggaccgttcgcatagtgagactgtgcctcagcccagttacggaacgaatccgttttgtgcggaagacgagccgcttgcccgtgcaatgcctgttcataggctgtcgtaagatcctcgaacaaaatgcgccaggatacggtatccactactaagtgatgaatagccatcagcaaatgatctccatcggggcaatggaatagccccagcttcaccagcggtccttcgcttaaatgaatgcccgcctgaatttcatttactttggcctcgatcgctgcagacacttcagtctcatggctgaagtctatacgttccagcgtatacagctcgccctcacccaccgcgcggttccaagcttcatacccgtgctcggtaaggcggaaaacgatccgcagtgcatcatgatgactaaccatttgatccatcgctgtacgcagcgccgctacattaaaaccgtccttgctatgcagcataatggattggttatgatgatgagcatccgtcaggttttgctcaaagaaccaatgctgaacaggtgtcagcttcacagtgcccaccacttcgctttgatccgccaatcgggtaaccgattggactttcagcgccaaggcagacaccgtcggatgactgaacaggtctttcatctccagtcgataacctgcttgcagcaagcgagacgagacttgcagagccttgatcgaatcgccgcccagctcgaagaagttatcctgcgtgcctacggcttccacgctcagcactccggcccataccgcagccagtacttgctccaccttggtacgcggggccacataggctgctcccgtatggatgctgccttccggctctggcaaggccttgcggtcgattttgccgttgctggtcagcggaatggcctccagacgcatcaagcgtgcaggcaccatgtgcgcggggagtcctgcttccagggctgcctgtatttcctcgatccgcagctcctctgtttctcccgtaatgtatccacacaaatacttgtgtccacgctcgtctgtccgatcgatgaccacggcttgacgcacacccggcacccgctggatcgccgtttcaatctcgcccagctcgatccggtagccccggattttgacttgatagtccatccggccgataaagtctacattgccgtccggcatccaccgcgccaagtcacctgtgcggtacagtcgttcacctggtacgtacgggttcgctacaaacttctcggctgtcagatccgcacggttcaggtaccctcgtgcgaccccgatgccgccgatgcacagttcgcccagtacgccgatcggcaccggattcagctgactgtccacaatgtagaagcgtgcgttcagccacgcctgaccaatcggcacatggccactgcttggcagcttcgacagttcttcgtcgtagaagctggagtcaattgccgcttcggtgacgccgtagctgttcatgatgcggatattcgcaccaaaccgttcttgcagcacccggtaatccgtcacgctgcagctatccgagctggtgatcagcagttccagactgctcatgtccagcccctgttcatgcacatgctgcataaacggtacgatcagggccggggtcgattcgaacacggtaatctggtaatcgcgaatccatccgtacagacggcttggatcaatccggtcatcttttggacagatgaccatcgtgcccccgttatagagcgtccgtgcaatatcaccgacgaacacgtcgaaggagaagctggccagttgcagcagtcgtaccgggaactggttcagacggtaatcccggcgatacgccgcagccgtatttaccaggctgcgatgctcaatcatgacgcccttcggacgtccggttgtgccagaggtgtaaatcacatacgccagatcgtgcggttcattgataggttcaacgtctgtcgtatcaccggtgtacagtgactcatcgtccaatgccagtacggtatgcagacgcagccctgttgccgattcggatgctgcttcgctgtcagacttcgaatctgctgttccatttaggtttccatgaagagcacctgattccatcgtttcagcgccagccgctgtttccagctcaccctcagtctgcccttcgaccaaggcctgatcgcttttctccagccatgcctgggcacgctcctgcaaactggtttgcgtgagcagcaccgtcgcaccgctatcctccagcatgaaacgaatgcgttcggacggataatctgcatccagcggcacatatgcgcctccagccttccacaccgccagtacgccgaccagcatgtttaccgagcgttcactccaaatgccaacaatcgactcgcgtccgataccttcatttcgcaatctacgcgccaattgatttgcacgttcattcagtgtgcggtacgtaagctgttgctcctcgtacaccaccgccacatgatccggtacaagctgggcctgttcttccacgtaggtatggaacagtgctcctgcttcaaccgcagtaacatctgatacgcctacatctccaaaaccatagaggatttgtgctttttcctcgacagttaccatatccaaagcggccagtggctgctttggatgcagtgtaatggctcgtacgagttcagtaaaatgctgtgcaaagcgcgcgatggtctcaggtttgtacagcgccgtgctgtattccagactgcacagaatgccttctggctgctctacagcatccaaggtcaaatcaaatttggacgtatgaacgtccgtcggatacggcttaaagatcagcccttccagctcgaactcctgctgctcaaatgttttcaattcaaacatcgtatcaaacagcgcattccggctcgtatcccgcgttacattcagcttttcaaccagctcctcaaacggatattcctggtgctcatacgcactgagcgcatgctctttgacctcttgcaagtagtccaggaacgttttgtcaccagacggataattacggatcgccagcgtgttcaggaatacgcctactaggctactgagctccgcatgtggtcttccggcaatcggcgtgccgacgatgatgtcctcttgacccgtgtatttatgcaagagtgtgctatacgctgcaagcaataccatgtacaaggtggatccggtttgcgcggccagctgcttcaactgctcgctgtcctccatgcagatcgcaaactcaaatcgagttccttccagacgctgtacggcgggtcttgtaaaatccgttggcatatccagtgccggaatttcaccagacatggtgttcagccaatagctttcttgcgcacgaagacgttcactttgcatatctgcatgctgccaaacggcatagtccttgtactgaatacgcagtggcgggagctccttgccttcgtacaattgagagaactcctgcacgataattccttccgtgacgccatccgaaataatatggtgcatgtcatagagcataacgtgacgccccggtccgttttcgatcaactgaactcgcagcaacggggcttgtgcgagatcaaaggcacgtacaaagtcctgtgcgtactgcggtgtctcttcttcgcttgcttgcacatactccacgctgaatgggacgttagattcaatccgctgaatcacctcgccatccaccatctcgaatcgggttcgcagggtttcatgacgggcaatcagctggcggaaggcttgttccagtcgctctttatccaaggagccttcgataatcaaagctcccggcatgttgtagctcacctctccaccttccaggtgactcagcacgtacatccgtttttgcgccgaggaaacgggataatagtcgcgctcctccgccacaggtatggatacatacgtttgctgggtctgatcttcacccatcacctgtaccaattgttcaattgtcggatattggaaaatatctcgcaaggccagcttgtgattcagctcctgatggattttcgccatcagggtggtggcacgcagtgaatgtcctcccacttcaaagaagttatcctggatgcctacccgctgatgattcagaacgctttgccaaatacgtaccagttgctcttccagctctgtccgcggcgcaacatactccgtgcctccttcgaggcgagcttccggtgctggcaacgctttgcggtcaattttcccgtttggtgtcagcgggaattgatccagtggtacgacatacgtcgggatcatatagcccggcagtttgggctggagtgtgctgcgtagctccggcaaattcagcgcctccgaggctacgacatacgcgcacagatctttgtctccgttttcgttttcccaggcggtgacgatggctttctcaatgccatccacagtcagcagttgcgcttccacctcgcccagttcaatccggaagccccggattttgacctgatcatccattcggccgataaagtctacattgccgtccggcatccaccgcgccaagtcgcctgtgcggtacagtcgttcgcccggtacgtacgggttcgctacgaatttttccgccgtcaggtccgcacggttcaggtagccccgtgcgaccccggctccgccgatgcacagctcacccagtacaccgatcggcaccggattcagctggctgtccacgatgtagaagcgggcattcagccatgcctgaccaatcggcacatggccgctgcttggcagcttcgacagctcttcgtcatagaagctggagtcaatcgctgcttccgtgacgccatagctgttgatgatacggatatttgcaccaaaccgttcttgcagcactcggtagtccgttacgctgcaactgtccgagctcgtgatgagtagcttcagactgctcatgtccagtgcttgttcatgcacatactgcataaacggtacgatcaaagctggagtcgattcgaacacagtgatttggtagtcacgaatccagccatgcagacggctaaaatcaagtcggtcgtctttcggacagatgaccatcgtgcctccgttatagagcgtccgcgccatatccccgacgaacacgtcgaaggagaagcttgccagttgcagcagtcgtactgggaactcgctcaggcgataatcccggcgatacgccgcagctgtattcaccaaactgcgatgctcaatcatgacgcccttcggacgtccggttgttccggaggtgtagatcacatacgccagatcctgcggttcgttgatgtgatcaacgtctgtcgtatctccggtgtacagtgactcatcgtccaatgccagcatgatttgcagacgcagctttgttgccgattcagatgctgcttcgctgtcagacttcgaatctgatttcaagctcaaaccttcattcaggttgtctctttccatcgtttcagcgctaaccgccgtctccagctcacccttagctttttcatcgccccaagtccattggctttcattcagccatgcttgtgcgcgctcctgcaatcccgtctgggtcaacagtaccgtcgcaccactgtcctccagcatgaaacgaatgcgctcggacggatagtctgcatccagcggcacatatgcgcctccagccttccataccgccaacacaccgaccagcatgtctaccgagcgctcactcaaaatgccgacaatcgactcgcgtccgataccttcatttcttagtctgcgcgccaattggttcgcacgctcgttcagtttccggtacgtaagctgttgctcctcgtataccaccgccacatgatctggtataagctgggcctgttcttccacataggtatggaacagggctcctactccaaccgcagcaacatccgttacgcccacttctccaaaaccgtagatgagttgctcttgttcctcatcggttaccatgttcaaaactgccagtggctgctgcggatgataggcaatcgctcgaacgatttccgcaaaatgctctgccaatcgcgtcatagtctcccgcttgtacagcgctgtgctgtattccagactgcacagaatgccttccggttgctctatcgcctccaagctcagatcgaatttggctgtgtgattatccagtggataggagctcaaggtcagccctttcagctcgaactcccgctgctccaacgttttcaattcaaacatcgtgtcgaacagcgcattccggctcgtatcccgggttaaattcagtttttcaaccagctcttcaaacggatagtcctgatgctcatacgcacgaagcgcatgctctttgacctcctgcagataatccaggaacgatttgtcgctggacggataattgcgcatcgccagtgtgttaatgaatacaccaaccaaactctccagttcggcatgcggtcgtccggcaattggcgtaccgacaatcatgtcctcttggcctgtgtatttgtgcaagagtgtggtgtacgccgccagcatcaccataaacagggtagagccggtctgggcagccagttctttcaggcgttcactatcctcacgctccagtacaaattcgaccgtatcccctgctgtactctgcaccgctgggcgggcaaagtccgtagagagatccagtacaggcagttcaccttggaaagtgctcagccagtacgcttcctgacgctgcatccattcctgatgggcttcgctttgctgccatacggcataatccttgtattgaatccgcaatggcgccagctcttcaccgccatacaaacgaacaaactcatcagtcaggacctccagggacaccccatctgagacgatatggtgcatatcgagcataagcagatgttgggattcctgttctactccttgaacgcccagatccaccaaacctactcgcagcagcggtgcagctttgagatcaaacggacggacaaagcgccgcaccagctgttgcgcctctatgttgaccctggtgtacgtatctgtagttgtgtcctgatctgtatccgcaatcacatcttctgcctgtaccttcgtatattccacctcgaatggcacggtgtcctcgatccattgcatcggctcattgtccaccagctcaaagcgagtacgcaaggtcgcatggcgggcgatcagttgacggaatatatgttccactcgtttcacgtccagcggaccgctcacttgcagcaccgacggcatgttgtagttcacatccagcggatcgaactgatgcagcacatacagtcgtttttgcgccgaggacagtggatagaagctacgctcttccgttaccggaatggacgcatacgccacctgatccagaccttccagcacagccgccagttgttcaatcgttggtgcttcaaaaatactgcgcagaggaagctgcttgttcagctcttggtgaatcttcgaggttagtgtcgtcgcccgcagcgaatgtccgccaatttcgaagaagttttccttcacgccaacttgcgccaggcccagcacatcctgccaaatttgcgccagcttcacttccacccacgtccgcggcgggacataatcggctccgctttgcaggctaccttccggtgctggcagtgccttgcggtcgattttgccattgggactcagtggcatctgctccagctgtacaaagtacgatggtaccatgtagcttggcagctcctgccccagcgcacttctcagctcgctggcactgatttcttgcccggcaacatagtaggccaccatgtgtttttgtcccgtttcgtccgcacgagccatgaccacggcttcgcgtaccgattccacttggagcaactgcgtttcgacctcgcccagctcaatccggtacccccggattttcacctgatggtcgatccggcccagatattcaatgttcccgtccggcatccatctcgccaaatcgccggtacggtacatccgctcataccctgcttccccgccggcaaacggatcagctacaaatttctcggccgtcagctctggacggttcagatatcctcgtgctacgccgacaccgccgatgcacagttcccctgccacgccaattggctgcaattgctccgtgccttccttgacgatgtacagacgaatgttttgaatcggtttcccgatcggaataaccgaataggctccatcaggctcgcaatcgaagtacgatacgtccaccgttgcttcggttgggccatacaggttgaccagcttcgctccggccaggctcgacacgagccgctggtaccgggccacatgctgtggcggcaatgcttcgccactggcaaagacatggcgcagtgtgcccagcttcgcttgcatcacttctcgtggctgctgttccacatactccaggaacgcatgcagcatggctggaacaaagtgcatcgtgctcacgccatcgcgggcaatcgtgtcgacgatgtcttccgggttcttttccccgccgaccgacagcaggcttacctttgagccgaccatcgaccaccagaacagctcccacaccgacacgtcgaaggtgaaggcggtcttttgcaggatcgtatcttctgcacccaggccgtagcgatcatgcatccacaaaatccggtttaacacggaatggtgctccaccattacacccttcggttttccagtggaaccggaggtgtagatgacataggcgacatgatgcggcccagccaggggctccagatttgaaccatcttcgtggtaaatattcttgccagcctgctcctgacgatctagcaccagcacctgaccgtcgaaactccgtgatgcttgctccgccagatgcgattgcgtcagcaccagcttcgcgcctgaatcctccagcataaagcggatgcggtcggccggatattccggatcgatcggtacataagctccgcctgctttgaggatcgcatagatacctacgatcatgtccagcgaacgatggaccagaatgcctacaggctgatcgggttcaaccccttccgcacgcagcgtccgagccaaacggttggttcgctcgttcagctcacggtaggtcaacatctccgacccgaatattaccgctgcctgatccggtgtaattgctgcctgctgctcaaacagtgcgcttagcgtttgatcctgtggataggctgccgccgtatctccccacacctgaatgatctgtgcctgttcttctggtgtcaccaattccagctcattcacacggatatgcggattgttcacgatttgctcgatgacatgcaatacatgtccctgcatccgctcgatcgtagaccgatcgtacacattcgcgttgtatctgaacatgatgcggaaggtgtcatccggcatcacaatcaagtccagatcatagttcgtctgctcaacaacctctacattcgtaatgtcaaatgcagacggacgaacttcacccaactgctcgacttgctcctctaccgggtaattctcaaataccataatgtgattaatcagattttgcttttgctcggtcagcgcctggatttcatatagcgggaagctgtcatatactcccgaagccaacgcttgctcctgcgtgttccgcatgatgtccacaaacgtggcattccgctcactttgaatccgaaccgggatcgtattaatgaacagaccgatcatattttctacacccgcaatatccgtcggacgtccagatacgacactgccgaatacaacatcctcattgttattatatttctgcaaaatcaggccccacacgctctgcatcagcgtattaatcgtgacctgctgctgcttggcaatccggtacatggcttcgctccacgttggatccagatctaccgttactttttcagaaacatattcgctggcttcgcttgctgtcgaggataccgcatgttccctgctgtccgtcacgtggtctttcgatgcagtatccgatcctggcaacaacgtctgctgttcaaagcccgccaaatagctgctccaatactcttttgccgcacgttcatcctgacgctccagccattcaatatattggccatacggtgtgatcggagccagctccggctgtttctgctccagcagcgcaaagtacgtaccaaacacctcacccgtaacgagcgataagcaccagccgtccatgataatgtgatggaagctccagacccagtgatacgtttcttcatcggtctgccatacctgtacgcgcatcagtgcatccgtaccgagatcaaagccccgagcctgatcctcctgcttcaacgcctggatatacgcctgttgttctgctttccgcattccgcgtacatccttgtaggaaaggtcgctatctttgtgacggaatacaatctgcaatggctcctgaccatgtccggtctcaaaccgatagaaattcgtccgcagcgcttcatgacgctgtgtcagcagatccaggctctgacggaaaatagcaacatcgaagctgcctttttgatcaaacgatgcttgctggaagtatgcgcctgagtctggctccatcaagctatggaacagcatccctttctgcatgggagaaagagcatacacattttccagttcgcccacagaagccgtttgctccgtcaattgctccagttgttccaacgacaagcctttgaacaagacatcgcttggcgttagttcgctccgctcttgggaggcacaatgcttgattacttcctgcaagctttcccgtagcaactgcgcaaatttttctacgttttgctgatgatatacttggctgtcatagcgaatttccagtgtcagcacgcctgctgtaatcatgccgttcacattcagcggctgctccagcacggtataaccactcatcggctctccgtccgtatgcgaagacagcacgatgtcactctgttccaaatcctgatcaaattgtcccaaatagttaaagctgatctctggctgcaggctccaggaagaggtagcatcatccgaagacatatacttcaaaataccgtagccaatgcccttatgcggcacatgacgcaggtcctctttgacccgcttgatgcgctgccctacttccgcctttccatcgacatccagcagcaccggatactgactcgtaaaccagcccacggtacgtgtgatatccacatctggaacaatagcctcccggccatgtccctccagattgaccagcacacgctcctgaccgctccagttgtacaatgcgctgccgagtgcggttaacagcagatcattgacctccgtattgtacgcacgatgtgattcctgaagcagcaaccgggtttcctgttcgttccaagccacggtcaccgtctcactatctctgacccaaaaaggctgtcctgctgctttgtcttgatccttaggtagcgatgcgactgccatgtgagcaagacgctgccagtattcgcgttcgttgtcaatggccggactgttcgcatattgagacaaccgctctgcccaagcagagaacgaatccgttttataaggcaagcgaatcgcttctccccgaatggcctgttcatatccagtcgcaaaatcttcaaacacaatccgccatgagatcccgtctataaccaaatggtgaatggcaatcagtaaatgatctccatccatgcagcggaagagtcccagcttcaccagcggtccttcatccagatgaatagagctttggatggcattggctttcatctcaatcgccatcatcacatctgccgtatcttcgacgcctgtcaaatctacaacgtccagatgatacagctcgccttcgttcacaccgcgattccacgcttcatagccctgttcggtctgacggaagaccatacgcaacgcatcatgatgctccgtcacctgggtcaccgtgcgatgcaatgcatctatatcaaagccttctgctcgatgcagcatcaccgactggttgaaataatgcggctctgccgacgatagtccaaaaaaccactgctggatcggggtcagcttgacgctgcccgaaacctcgccctgatcggccgtacgactaactgggtgtacatgaccactcagcagcgaaatggatggatattggaacaaatccttcatgtccagcttgtagcccgcttgcagcaagcgggaggatacctggattgctttgatcgaatcgccgcccagatcaaagaaattatctaaaataccgatgttcttcgttcctaatacagactgccaaatcgaagccaacgtctgctccagcgctgtgcgcggctctacataatccgctccgctttgcagactgccttccggtgccggcagggccttacggtcgattttgccgttcggtgtcagcggcatctgctccagctggatgaaatacgaaggcaccatgtagtttggcagctcctcacccaggaagccgcgcagctccccagcgcttacgtctctttcagcgacatagtacgccaccagttggttttgtccctgctcgtccgcttgagccaggacgatgacttcttgcacgttttccactttcaacatttgtgcctcgacttcgccgagttcgatccggtagccccggattttcacctgatggtcgatccggcccaaatattcaatgttgccatcaggcatccatctcgccaagtcccccgtacggtacattcgttcatagcctgcttcacccgccgcaaacgggttcgctacgaatttctccgccgtcagctctgggcgatccagataaccacgcgccagacccggaccggacacgcacagctcacctgctacgccgaccggcgccaaatgtccatgcacatccaccatgtatacccggtgattcggcacaggacgtccgatggaaatgagttgtcctgccctttcatcctcggataccggccagatggatgttgccaccgagttttcggttggaccatagccattgtagtacgccacctgatccttccacttgtataccagttcggtggatgaggctgaacccgcagtgaacagaatacgcaggtgcggcatccgccccggctccaaatacactgcataagttggcggcaaagcagccaccgtaatgtggtgatccgccatatattgctcaaaccgttcgtagttcaaaatcgtctctgttgttggcacgtataacgtagccccgcagaacagcgcctggaagatttcccagcaagccgcatcaaacgagtagctggcaaatagcagcgcatgatccgacgcacgaatcttgagcgtctgatcaaaatacgttttcagattgcacagcccgtggtgctccagcatcacgcccttcggctgcccggttgtacctgacgtgtagatcacatacgccaaatcgtttggaccagacagcggctccaggttggaaccatcctcgtggtacaccgattgttccccatccaataccagcacttgaccgtcgataacggctttgtccaccagatgactttgtgtcaatagcagcttcgctcccgagtcatccagcatatagcggatacgttcctccggataggttggatcgataggaacataggcgcctccggcttttaaaatcccgaagatgcccacaagcatgtccaccgaccgctcggtcatcagacccaccaaacgatctttcgtcacgccttgactgcgcaaggtacgcgctaatcgattggcgcgttcattcagctcgcgataagtcaactgctctccttcaaagaacaaggctgtctgctctggcgtctgcgcggtttgcgcctcgaacaagccgtgaatcgtttgctcgcttgcataggctgccgctgtattgccccacacctcaacgatttgcttacgctcctgcatcgtaaccatgtccagttcatgtacgcgaatgttcggattcgctgtcacctgctccagtagctgcaccagatgacctcgaatttgttccacactttcccgttcaaaggctagggcattatagccaaagctcatgtgaatggtattccccggcagcactaccacgttaaagtcatagttggtctgctcgacagactcggctcctgtgatcgtgaagctggacgcctcactactacctaattgctcgatttgttcctctaccggataattttcaaaaataagaatatgatggatcaaatcctgcttaagctccgacaacccctgaatttcatacaacggatacgtatcatacacatgggaatcgatcgattgctcctggatgtgcttcatcacgtcggagaatacgctgtccacctgactgtggatacgcaccggaatcgtattgataaacagaccaatgatatgctccacattcggaatgtctgccggacgtccagataccacactgccaaacacgacatcatcggtgccattatatttttgcagcaaaaggccccatacggtctgcatcaacgtattgatggtgacctgataacgcttggctatgcgctgaataccagctgtgaactctgcgcccaaatcaaaatccagacgctccgcctgataccccgtcttaccctgaatttttgcctgtggcaagcgggactgctcctcatacccttccaaaaccttgctccagtagcttgatgcagcctgacgatcctgctgctctagccattcgatatattgactgtacggggttacaggggccagttcaggttgtttatgagccagtatcgcaaaataacttgcaaacacttcgtttgtcaccagcgacaagcaccagccgtccatcacaatatggtggaagctccatacaaaacgatacgtctcctcacctgtgcgcaacacagcgacacgcatcaaggcgtcttgtgccaggtcaaagcctctttgcttgtctttacgcgtaaattcgagcatgtattcgttttgctgctcgtcctccatgtcccttaaatcttcaacatacagttcgctgcgcttattccggtacacgacctgaagcggttcatccttccagccgctgtagaagttcgtgcgcagtaccgtatgccgctgcaccaagacatccaaactggctgcaaaggcagcgatattaaaatgtcctcgcagatcaaaggaggcctgttcaaaataagctcccgattgcgaatccatcagattgtaaaagagcatgcccttctgcatcggcgtcagtgcgtatacattttccagctcaccgatacgtgccgcctgttccgcaatctgttccagctcaccagtcgtcagacctttgaaggatacatcacttggggtaagctctggccgctcctgagcgacgcaatgcgtaatgacctcctgcaaagcggatttcattagccccgccactcgttccagcgtttctttacgatactgcttacggctgtaagcgatcgtcaaacgcagcgtgccttccgagatcattgcgttcaaatccagcgtgtacagtaacggtgaatgggcatcctctgtctcccctgcacggtaggaggacaacgtaattccactgttttgcagatcctgatcgacctgccccaaatagttaaagctgatttccggttcggctgcgatcgtatccatttcatctgcaggcaacgcagaggacaggtaacgccaagtgccataggtcagccctttatgcggaatgcgccgcaagccttccttcgtttctttaatccgctctgccagtgtcatttccttgccggtctccagcagcactggatacaagctcgtaaaccagcctactgtacgtataatatccacctctggcaagatcgcttcccgaccatggccctccaggttcaccagtacatgtcctgcacctgtccagttgtgcaccgcgagtcccagcgcggtcagcagcaaatcattgacctcggtgttataggcgcgatgggcctgcttcaacagttgctcggtttcagcttcagtccactccaccgttagcacttcgctgtctgcattcacggagccctcataggcaaaatccttaggcagtggtgcagcttcagctttgacctgttccagctgcttccaatagacttcatccgatacagcctcaggacggttagcataagaggataactcccgtgcccacgtttggaagaaatctgttttatagggcaatcgtacaggctcgccctggatcgcctgctcgtagcctgtcgagaaatcttcaaacagaatccgccacgacaccccgtccaccaccaagtggtgaatagcgatcagcagatggtcgccctcggttgtgcagaacaatccgagtttcaccaagggtcctgcggacaggtccatgctgctttgaatttccattgccttcgcttccagcgcttccgcataagcggcccgttcacggtaatccaaagtttccagtgtatataacgtgccttcctctacatggcgagtccaagctgtataaccagcggaagtctgatggaataccgtacgcagcgcatcatgatgcttcacgaggtgatccatggcttggcgaaccgctgtctcatcaaaaccctcggcgcgatagagcataaccgcttgattaaagtgctgcggacgctcgcgctcctgcgcaaagaaccaatgctggatcggaagtagcgccgtttccccgctgacttcttcctgatctgccatacgacggacctcttgcatatgcggtgccagggcttcaacggttggatactggaacaaatccttcatgtccagcttatagccggcctggaacgcacgggaggcgatttggatcgccttgatcgaatcaccgcccaggtcgaagaaattgtccagaataccgaccgtctgcagccccagtaccgactcccagacggctaccaaagcgcgttcttgcgccgtacgcggctcggcataatcgactccggtttgcaggctgccctctggtgcaggcaaggccttgcggtcgattttgccattcggtgtcagtggcagctgttccagttgtacaaagtaggatggcaccatgtagcctggcaactcccgtcccagctcacttcttagcttgctggcctcgacttcttgtcccgcgacatagtaggccaccatgtggttttggcccatttcgtccatacgggccacgacgaccgcttcgcgtaccgattccacctggagcagctgcgattcgacctcgcccagctcaatccgataacccctgattttcacctgatgatcgatccggcccagatattcaatgttgccgtccggcatccatctcgccaaatcgccggtgcggtacatccgttcatagcctgctttgcctccggcaaacgggttctctacaaatttctcggccgt

SEQ ID NO: 418 - DNA, 20202 bp, Paenibacillus polymyxa
  source 1..20202: mol_type = genomic DNA
  misc_feature 1..20202: note = strain LU17007 mutant with genomic deletion
ggtgaagcgttgccgccacagcatgtggccaggttccagcggctcgtatcgagcctgaccggagcgaagctgatcaacctgtacggcccaaccgaagcgacggtggacgtatcgtactttgattgcgagccggatgaggaatatacagttatcccgatcgggaaaccgattcaaaatatccgtctgtatatcgtgaaggaaggcacggagcaattgcagccgattggtgtggcaggggaactgtgcatcggcggtgtcggcgtagccagaggttacctgaaccgtccggagctgacggccgagaaatttgtagagaacccgtttgccggaggcaaagcaggctatgaacggatgtaccgcaccggcgatttggcgagatggatgccggacggcaacattgaatatctgggccggatcgatcatcaggtgaaaatcaggggttatcggattgagctgggcgaggtcgaatcgcagctgctccaggtggaatcggtacgcgaagcggtcgtcgtggcccgtatggacgaaatgggccaaaaccacatggtggcctactatgtcgcgggacaagaagtcgaggccagcaagctaagaagtgagctgggacgggagttgccaggctacatggtgccatcctactttgtacaactggaacagctgccactgacaccgaatggcaaaatcgaccgcaaggccttgcctgcaccagagggcagcctgcaaaccggagtcgattatgccgagccgcgtacggcgcaagaacgcgctttggtagccgtctgggagtcggtactggggttgcagacggtcggtattctggacaatttcttcgatctgggcggtgattcgatcaaggcgatccaaatcgcctcccgtgcgttccaggccggctataagctggacatgaaggatttgttccagtatccaaccgttgaagccctggcaccgcatatgcaagaggtccgtcgtatggcagatcaggaagaagtcagcggggaaacggcgctacttccgatccagcattggttctttgcgcaggagcgcgagcgtccacagcactttaatcaagcggtcatgctctatcgcgcggagggctttgaggagatggcaattcgccaagccatggatcacctcgtgaagcatcatgatgcgctgcgtacggtattccatcagacttccgctggttatacagcttggactcgccatgtagaggaaggcacgttatatacactggaaatggtagattaccgtgaacgggccgcttatgcggaagcgctggaagcgaaggcaacggaaatccaaagcagcatggacctgtccgcaggacctttggtgaaactcggatggttccgcacagcggagggcgaccatctgctgatcgccattcaccacttggtggtggacggggtgtcgtggcggattctgtttgaagatttctcgacaggctacgagcaggcgatccagggcgagtccgtacgattgccctataaaacagattccttccaaaaatgggcacgggagttgtcctcttatgctaaccgtcctgaggctgcatcggatgaagtctattggaagcagctggaacaggtcaaagctgaagctgcaccactgcctaaggattttgcctacgagggctccgtgaatgcagacagcgaagtgctaacggtggagtggactgaagctgaaacccagcaactgctgaagcaggcccatcgcccctataacaccgaggtcaatgatttgctgctgaccgcgctgggactcgcggtgcacaactggacaggtgcaggacatgtactggtgaacctggagggccatggtcgggaagcgatcttgccagaggtggatattacacgtacagtaggctggtttacgagcttgtatccagtgctgctggagaccggcaaagaaatgacactggcagagcggattaaagaaacgaaggaaggcctgcggcgtattccgcataaagggcttacctatggcacttggcgttacctgtcctctgcgttgcctgcagatgaagtgggcacgatcgcagcagaaccggaaatcagctttaactatttggggcaggtcgatcaagatctgcaaaacagtggaattacgttgtcctcctaccgtgcaggggaaacagaggatgcccattcaccgttactgtacacgctggatttgaacgcgatgatctcagaaggcaagctgcgcttgacgatcgcttacagccgtaagcagtatcgtaaagaaacgctggaacaggtggcggggctgctgcaatccgctttgcaggaggtcattacgcattgcgtcgctcaaaagcagcctcagctgacgccaagtgatgtatccttcaaaggtctgacgactggagagctggaacagatcgcggaacaggcagcacgtatcggtgagctggaaaatgtatacgcactgacgccgatgcagaagggcatgctcttttacaatctgatggattcgcaatcgggagcttattttgaacaggcctcctttgatctgcgaggacattttaatatcgctgcctttgcagccagtttggatgtcttggtgcagcggcatacggtactgcgcacgaacttctacagcggctggaaggatgaaccgcttcaggtcgtgtaccggaataagcgcagcgaactgtatgttgaagatttaagggacatggaggacgagcagcaaaacgagtacatcctcgaatttacgcgccaagacaagcaaagaggctttgatctggcgcaggatgttttgatgcgtgtggctgttttgcgcacaggtgaggaatcgtaccgttttgtatggagcttccatcatatcgtgatggacggctggtgcttgtcgctggtgaccaacgaagtgtttgcgagttattttgcgatactggctcataaacaacctgaactggcccctgtaacgccgtacagtcaatatatcgaatggctggaacagcaggatcgtcaggccgcatcaagctactggagcaaggttctggaaggatatgaggagcagtcccgtttgccacaggcaaaaattcagggtaagacggggtatcaggcggagcgtttggattttgatttgggcgcagacctcacagctggtattcagcgcatagccaagcgttatcaggtcaccatcaatacgttgatgcaaaccgtttggggccttttgctgcaaaaatataatggcaccgatgatgtcgtgtttggcagtgtagtatctggacgtccggcagacattccgaatgtggagcatatcattggtctgtttatcaatacgattccggtgcgtatccgcagtcaggtggacagcgtattctccgacgtgatgaagcacatccaggagcaatcgattgcttcccatgtgtatgatacgtatccgttgtatgaaattcaggggctgtcggagcttaagcaggatttgatcaaccatattcttatttttgaaaattatccggtagaggaacaaatcgagcaattaggtagtagtgaggcgtccagcttcacgatcacaggagccgagtctgtcgagcagaccaactatgactttaacgtggtagtgctgccggggaataccattcacatgagctttggctataatgccctagcctttgaacgggaaagtgtggagcaaattcgaggtcatctggtgcagctactggagcaggtgacagcgaatccgaacattcgcgtacatgaactggacatggttacgatgcaggagcgtaagcaaatcgttgaggtgtggggcaatacagcggcagcctatgcaagcgagcaaacgattcacggcttgttcgaggcgcaaaccgcgcagacgccagagcagacagccttgttctttgaaggagagcagctgacttatcgcgagctgaatgaacgcgccaatcgattagcgcgtaccttgcgcagtcaaggcgtgacgaaagatcgtttggtgggtctgatgaccgagcggtcggtggacatgcttgtgggcatcttcgggattttaaaagccggaggcgcctatgttcctatcgatccaacctatccggaggaacgtatccgctatatgctggatgactcgggagcgaagctgctattgacacaaagtcatctggtggacaaagccgttatcgacggtcaagtgctggtattggatggggaacaatcggtgtaccacgaggatggttccaacctggagccgctgtctggtccaaacgatttggcgtatgtgatctacacgtcaggtacaaccgggcagccgaagggcgtgatgctggagcaccacgggctgtgcaatctgaaaacgtattttgatcagacgctcaagattcgtgcgtcggatcatgcgctgctatttgccagctactcgtttgatgcggcttgctgggaaatcttccaggcgctgttctgcggggctacgttatacgtgccaacaacagagacgattttgaactacgaacggtttgagcaatatatggcggatcaccacattacggtggctgctttgccgccaacttatgcagtgtatttggagccggggcggatgccgcacctgcgtattctgttcactgcgggttcagcctcatccaccgaactggtatacaagtggaaggatcaggtggcgtactacaatggctatggtccaaccgaaaactcggtggcaacatccatctggccggtatccgaggatgaaagggcaggacaactcatttccatcggacgtcctgtgccgaatcaccgggtatacatggtggatgtccatggacatttggcgccggtcggcgtagcaggtgagctgtgcgtgtccggtccgggtctggcgcgtggttatctggatcgcccagagctgacggcggagaaattcgtagcgaacccgtttgcggcgggtgaagcaggctatgaacgaatgtaccgtacgggggacttggcgagatggatgcctgatggcaacattgaatatttgggccggatcgaccatcaggtgaaaatccggggctaccggatcgaactcggcgaagtcgaggcacaaatgttgaaagtggaaaacgtgcaagaagtcatcgtcctggctcaagcggatgagcagggacaaaaccaactggtggcgtactatgtcgctgaaagagacgtaagcgctggggagctgcgcggcttcctgggtgaggagctgccaaactacatggtgccttcgtatttcatccagctggagcagatgccgctgacaccgaacggcaaaatcgaccgtaaggccctgccggcaccggaaggcagtctgcaaagcggagcggattatgtagagccgcgcacagcgctggagcagacgttggcttcgatttggcagtctgtattaggaacgaagaacatcggtattttggataatttctttgatctgggcggcgattcgatcaaagcaatccaggtatcctcccgcttgctgcaagcgggctacaagctggacatgaaggatttgttccaatatccgtccatttcgctgctgagtggtcatgtacacccagtcagccgtacggccgatcagggcgaggtttcgggcagcgtcaagctgaccccgatccagcagtggttctttggactatcgtcggcagagccgcactattttaaccagtcggtaatgctgcatcgagcagaaggctttgatatagatgcattgcatcgcacggtgacccaggtgacggagcatcatgatgcgctgcgtatggtcttccgtcagaccgaacagggctatgaggcgtggaatcgcggtgtgaacgaaggcgagctgtatcatctggacgttgtagatttgacaggcgtcgaagatacggcagatgtgatgatggcgattgagatgaaagccaatgccatccaaagctccattcatctggatgaaggaccgctggtgaagctgggacttttccgctgcatggatggagatcatttactgattgccattcaccatttggttatagacgggatctcatggcggattgtgtttgaagattttgcgactggatatgagcaggccgttcggggagaagcgattcgcttgccttataaaacggattcgttctctgcttgggcagagcggttgtctcaatatgcgaatagtccagccattgacaacgaacgcgaatactggcagcgtcttgcccacatagaagttgcatcgctacctaaggatcaagacaaagcagcaggacagcctttttgggtcagagatagtgagacggtgaccgtggcttggaacgaacaggaaacccggttgctgcttcaggaatcacatcgtgcgtacaatacggaggtcaatgatctgctgttaaccgcactcggcagcgcattgtacaactggagcggtcaggagcgtgtgctggtcaatctggagggacatggccgggaagctattgttccagatatggatattacacgtaccgtgggctggtttacgagtcagtatccggtgctgctggatgtcgatggaaaggcagagattgggcagcgcatcaagcgggtcaaagaggacctgcgtcatgtgccgcataagggcattggctacggtattttgaagtatatgtcttcggatgatgctacctcttcctggagcctgcagccagagatcagctttaactatttgggacaatttgatcaggatttggaacaaagcgatatcgtgctgtcttcgcatacggacggagagccgatgagtggttataccgtgctggagcagccgctgaatgtgaacggcatgattacagcaggcgtgctgacactggaaattcgctatgacagacaagtatatcatcagcaaaacgtagaaaaatttgcgcagttgctacgggaaagcttgcaggaagtaatcaagcattgtgcctcccaagagcggagcgaactaacgccaagcgatgtcttgttcaaaggcttgtcgttggaacaactggagcaattgacggagcaaacggcttctgtgggcgaactggaaaatgtgtatgctctttctcccatgcagaaagggatgctgttccatagcttgatggagccagactcaggcgcatacttccagcaagcatcgtttgatcaaaaaggcagcttcgatgttgctgttttccgcaagagcctagatctgctgacacagcgtcatgaagcgctgcggacgaatttctatcggtttgagaccggacatggtcaggagccattgcagattgtattccgtcacaaagatagtgacctttcctacaaggatgtacgcggaatgcagaaagcagaacaacaggcgtatatccaggcgttgaagcaggaggatcaggctcggggctttgatctcggtacggatgcactgatgcgcgtacaggtagtgcagaccgatgaagaaacgtatcactgggtctggagcttccatcacattatcatggacggctggtgcttatcgctcgttaccggggaagtgtttggtacgtactttgcgctgctggagcagaaacagccggagcttgctccaatcacaccgtatggtcaatatattgaatggctggagcgtcaggatgaacgtgcggcaaaagagtattggagcaactatttggcaggctttgaacagcagacgttgctgcctggatcggatactgcatcgaaagatcaagtggcagacagcagagataacactgtatccactacagcaagtacaaccagcgaatatgtttgcgaaaaaataacggtggagctggatccaacatggagcgaagccatgtaccggattgccaagcagcagcaggtcacgattaatacactgatgcagagcgtgtggggcctgattttgcagcaatataacaacaatgaggatgttgtattcggcagtgtcgtatctggacgtccgacggatattgcgggtgtagaaaatatgatcggtttgttcattaataccatcccggttcggattcaaagtgaacggaatgccacgtttgtcgacatcatgcggaacacgcaggagaaagcgctggcttcgggggtatatgacagcttcccgctgtatgaaattcaggcgctgaccgagcagaagcagcatctgattaatcacattatggtatttgagaactatccggtcgaggagcaagtcgagcagttgggcgaagttcgtccatccgcgtttgacattacgaatgtagaggttgttgagcagacgaactatgatctggacttgattgtgatgccggatgaaaccttccgtatcatgttcagatacaacgcaaatgtgtacgaccggtctacgatcgagcggatgcagggacatgtactgcatgtcattgagcaaatcgtgaacaatccgcatatccgtgtgaatgagctggaattggtgacaccagaagaacaggcacagatcgttcagatatggggagatacagcggcagcctatccgcaggatcagacgctaagcagtctgtttgagcagcaggtcgcgaacacgccggagcaagtggcagtgctgtgcggagcagaatcgttaacctacgctgagctgaacgagcgagccaatcgtttggcccggacgctacgtgcggaaggggtggaacccgatcagccggtgggcattctgcttcaccgttcgctggacatgatcgtaggtatctacgcgatcctcaaggcaggcggagcttatgtaccgatcgatccggaatatccggccgaccgcatccgctttatgctggaggattcaggcgcgaagctggtgctgacgcaatcgcatctggcggagcaagcatcgctgagtttcgacggccgggtgctggtgctggaccgtgaggacatctatcacgaagatggctcgaatctggagcccttggccggaccgcaccatgtggcctatgtgatctatacctccggttccaccggaaaaccgaagggtgtaatggtggagcaccattccgtgctaaaccggattttgtggatgcatgatcggtacggcttgggtgcggaaaatacgattctgcaaaagaccgccttcaccttcgacgtgtcggtgtgggagctgttctggtggtcgatggtcggctcaaaggtaagcctgctgtcggtcggcggggaaaagaacccggaagacatcgtcgacacgattgcccgcgatggcgtgactacgatgcactttgtaccagcaatgctgcatgcgttcctggagtatgtggaacagcagccacgagaagtgatgcaagcgaagctgggcacactgcgccatgtctttgccagtggtgaagcgttgccgccacagcatgtggcccggttccagcggctcgtgtcgagcctggccggagcgaagctggtcaatctgtatggcccaaccgaagcgacggtggacgtatcgtacttcgattgcgagcctgatggagcctattcggttattcctatcgggaaaccgattcaaaacattcgtctgtacatcgtcaaggaaggcacggagcaattgcagccaattggcgtggcaggggaactgtgcatcggcggtgtcggcgtagcccgcggttacctgaaccgtccggagctgacggccgagaaatttgtgaaagatccgtttgccggcggggaagcagggtatgagcgaatgtaccgcaccggcgatttggcgagatggatgccggacgggaacattgaatatctgggccggatcgaccatcaggtgaaaatccgggggtaccggattgagctgggcgaggtcgaaacgcagttgctccaagtggaatcggtacgcgaagccgtggtcatggctcgtgcagatgaaacgggacaaaaacacatggtggcctactatgttgccgggcaagaaatcagtgccagcgagctgagaagtgcgctggggcaggagctgccaagctacatggtaccatcgtactttgtacagctggagcagatgccactgagtcccaatggcaaaatcgaccgcaaggcactgccagcaccggaaggtagcctgcaaagcggagccgattatgtcccgccgcggacgtgggtggaagtgaagctggcgcaaatttggcaagatgtgctgggcctggcgcaagttggcgtgaaggaaaacttcttcgagattggcggacattcgctgcgggcgacgacactaacctcgaagattcaccaagagctgaacaagcagcttcctctgcgtagtatttttgaagcaccaacgattgaacaactggcggctgtgctggaacagctggatcaagtggcgtatgcgtccattccggtaacggaagagcgcagcttctatccactatcctcggcgcaaaaacgactgtatgtgctgcatcagttcgatccgcaggatgtgaactacaacatgccgtcggtgctgcaagtgagcggtccgctggacgtgaaacgagtggaacatatattccgtcaactgatcgcccgccatgcgaccttgcgtactcgctttgagctgatcgacagtgagccaatgcaatggatcgaggacaccgtaccgttcgaggtggaatatacgaaggtacaggcagagggtgcgactgcggatacagatcaggacacaactacagatacgtacaccagggtcaacatagaggcgcaacagctggtgcggcgctttgtccgtccgtttgatctcaaagctgcgccgctgctacgagtaggcttggtggatctgggccttcaaggagtagaacaggaatcccaacatctgcttatgctcgatatgcaccatatcgtctcagatggggtgtccctggaggtcctgactgatgagtttgtccgtttgtatggcggtgaagagctggcgccattgcggattcagtacaaagattatgccgtatggcagcaaagcgaagcccatcaggaatggatgcagcgtcaggaagcgtactggctgaacaccttccgaggggaactgcctgtgctggatctctctacggactttgcccgcccagcggtacagagtacggcaggggatacgatcgaatttgtactggagcgtgaggttagtgaacgcctgaaagaactggctgcccagaccggctctaccctgtatatggtgatgctgacggcgtacaccacactcttgcacaaatacacaggccaagaggacattgtagtcggtacgccgattgcaggacgaccgcatgcggagctcagtaatctagtcggtgtcttcattaacacgctggcgattcgcaattatccatccggcgatacatcgttccttgagtatctgcaagaggtcaaggagcaggcacttaatgcttatgagcatcaggattatccttttgaagagctggttgaaaaactgaatttaacccgggatacgagccggaatgcgctgttcgacacgatgtttgaattgaaaacatgggagcagcgggagttcgagctggaagggctgaccttgagctcctatccactggacaatcaaacggcaaaattcgatctgagcttggaggcgatagagcagccggaaggcattctgtgcagtctggaatacagcacagtgctgtacaagcgggagaccatgacgcgattggcacagcattttgcggaaatcgttcgagcgattgcctatcatccgcagcagccactggcagttttgaatatggtaaccgatgaggaacaagagcaactcatctacggttttggagaagtgggcgtatcggatgttgctgttgaagcaggagccctgttccatacctatgtggaaaaacaggcacagcttataccagatcaagtggcggtggtatacgaggggcaacagcttacgtaccggaaactgaacgagcgtgcgaaccaattggcgcgcagactaagaaatgaaggtatcggacgcgagtcgattgtcggcattttgagtgagcgctcggtagacatgctggtcggtgtgttggcggtatggaaggctggaggcgcatatgtgccgctggatgcggattatccgtccgaacgcattcgtttcatgctggaggacagcggtgcgacggtgctgttgacccagacgggattgcaggagcgcgcacaagcatggctgaatgaaagccaatggactttgggcgatgaaaaagctaagggtgagctggagacggcggttagcgctgaaacgatggaaagagacaacctgaatgaaggtttgagcttgaaatcagattcgaagtctgacagcgaagcagcatctgaatcggcaacaaagctgcgtctgcaaatcatgctggcattggacgatgagtcactgtacaccggagatacgacagacgttgatcacatcaatgaacctcaagatctggcgtatgtgatctacacctccggaacaaccggacgtccgaagggtgttatgatcgagcatcgctgcttggtgaatacggctgcggcgtatcgccgggattatcgcctgagcgagttcccagtccgactgctgcaactggccagcttctccttcgacgtgttcgtcggggatatggcgcggacgctctataacggcggcacgatggtcatttgtccgaaagacgaccgacttgattttagccgtctgcacggttggattcgtgattatcaaattaccgtgttcgaatcgactccggccctgatcgtaccgtttatgcagcatgtgcatgaacaggggctggacatgagcagcatggaactgctgatcactagctcggatagctgcagcgtgacggattaccgggtgctgcaagaacggtttggcgcagatatccgcatcatgaacagctatggcgtcacggaagcggcgattgactccagcttctatgatgaagaactgtcgaagctgccaagcagcggccatgtgccgattggtcaggcatggctgaatgcccgcttctacatcgtggacagccagctgaatccggtgccgatcggtgtactgggcgaactgtgcatcggcggcatcggggtcgcacgggggtacctaaaccgtgcggacctgacggccgagaagttcgtagcgaacccgtacgtaccgggcgaacgactgtaccgcacaggcgatttggcgcggtggatgccggacggcaatgtagactttatcggccgaatggatgatcaggtcaaaatccggggcttccggattgaactgggcgaggtggaagcgcagctgctgactgtggatggcattgagaaagccatcgtcaccgcctgggaaaacgaaaacggagacaaagatctgtgcgcgtatgtcgtagcctcggaggcgctgaatttgccggagctgcgcagcatactccagcccaaactgccgggctatatgatcccgacgtatgtcgtaccactggatcaattcccgctgacaccaaacggaaaaattgaccgcaaagcgttgccagcaccggaagcgcgcctcgaaggaggcacggagtatgttgcgccgcggacaccgctggaagagcaactggtacgtatttggcaaagcgttctgaatcatcagcgggtaggcatccaggataacttctttgaagtgggaggacattctctgcgcgctacaacactgatggcgaaaatccatcaggagctgaatcacaagctggccttgcgagatattttccaatatccgacgattgagcaattggtacaggtgatgggtgaagatcagacccagcaaatgtatgtatccatacctgtggcggaggagcgcgaatattatcccgtttcctcggcgcaaaaacggatgtacgtgctgagtcatctggaaggcggagaggtgagctacaacatgccaggagctttgattatcgaaggctccttggataaaaagcgactggaacaagccttccgccagctgattgcccgtcacgaaaccttgcgaacccgattcgagatggtggatggcgaggtgattcagcggattgaatctaacgtcccattcagcgtggagtatgtgcaagcaagcgaagaagagacaccgcagtacgcacaggactttgtacgtgcctttgatctcgcacaagccccgttgctgcgggttcagttgatcgaaaacggaccggggcgtcacgttatgctctatgacatgcaccatattatttcggatggcgtgacagaaggaattatcgtgcaggagttctctcaattgtatgaaggcaaggaactgccgcccctgcggatacagtacaaggactatgcggtttggcagcatgcagatatgcaaagtgaacgtcttcgtgcgcaagaaagctattggctgaacaccatgtctggtgaaattccggcactggatatgccaacggattttacaagacccgccgtacagcgtctggaaggaactcgatttgagtttgcgatctgcatggaggacagcgagcagttgaagcagctggccgcgcaaaccggatccaccttgtacatggtattgcttgcagcgtatagcacactcttgcataaatacacgggtcaagaggacatcatcgtcggcacgccgattgccggaagaccacatgcggagctgggtagcctagtaggcgtattcctgaacacactggcgattcgcaattatccgtctggtgataaaacgttcttggactacttgcaagaggtcaaagagcatgcgctcagtgcgtatgagcaccaggaatatccgtttgaggagctggttgaaaagctgaatgtaacgcgggatacgagccggaatgcgctgtttgatacgatgtttgagctgaaaacatttgagcagcaggagttcgagctggaagggctgaccttcaagccgtatccgacggacgatcatacgtccaaatttgatctgaccttggatgccgtagagcagtcagaaggcattctgtgcagtctggaatacagcacggcgctgtacaagcctgagaccatcgcgcgctttgcacagcattttactgaactcgtacgagccattacacttcacccacagcagtcactgtccgctttggatatggtaactgtcgaggaaaaagcacaaatcatctatggttttggagatgtaggcgtatcggatgttgctacagttgaagcagaagccttattccatgtctttgtggaagaacaggcccagcttgtaccagatcatgtggcggtggtgtacgaagagcaacaacttacgtaccgcacactgaatgaacgttcgaaccaactcgctcgcagactgcgaaatgaaggtatcggacgcgaatcgattgtcggcatttggagtgaacgctcggtaaacatgctggtcggcgtactggcggtgtggaaggctggaggcgcatatgtgccgctggatgcagactatccgtccgagcgcattcgtttcatgctggaggatagcggtgcgacggtgctgctcacgcaaaccagtttgcaggagcgtgcccaggcatggctggagaaaagcgatcaggccttggtcgaagggcagactgagggtgagctggaaacagcggctggcgctgaaacgatggaatcaggtgctcttcatggaaacctaaatggaacagcagattcgaagtctgacagcgaagcagcatccgaatcggcaacagggctgcgtctgcataccgtactggcattggacgatgagtcactgtacaccggtgatacgacagacgttgaacctatcaatgaaccgcacgatctggcgtatgtgatttacacctctggcacaaccggacgtccgaagggcgtcatgattgagcatcgcagcctggtaaatacggctgcggcgtatcgccgggattaccgtctgaaccagttcccggtacgactgctgcaactggccagcttctccttcgacgtgttcgtcggtgatattgcacggacgctctataacgggggcacgatggtcatctgtccaaaagatgaccggattgatccaagccgtctgtacggatggattcgcgattaccagattaccgtgttcgaatcgaccccggccctgatcgtaccgtttatgcagcatgtgcatgaacaggggctggacatgagcagtctggaactgctgatcaccagctcggatagctgcagcgtgacggattaccgggtgctgcaagaacggtttggtgcgaatatccgcatcatgaacagctacggcgtcaccgaagcggcaattgactccagcttctacgacgaagaactgtcgaagctgccaagcagtggccatgtgccgattggtcaggcgtggctgaacgcacgcttctacattgtggacagtcagctgaatccggtgccgatcggcgtactgggcgaactgtgcatcggcggcatcggggtcgcacgagggtacctgaaccgtgcggatctgacagccgagaagtttgtagcgaacccgtacgtaccaggtgaacgactgtaccgcacaggtgacttggcgcggtggatgccggacggcaatgtagactttatcggccggatggactatcaagtcaaaatccggggctaccggatcgagctgggcgagattgaaacggcgatccagcgggtgccgggtgtgcgtcaagccgtggtcatcgatcggacagacgagcgtggacacaagtatttgtgtggatacattacgggagaaacagaggagctgcggatcgaggaaatacaggcagccctggaagcaggactccccgcgcacatggtgcctgcacgcttgatgcgtctggaggccattccgctgaccagcaacggcaaaatcgaccgcaaggccttgccagagccggaaggcagcatccatacgggagcagcctatgtggccccgcgtaccaaggtggagcaagtactggctgcggtatgggccggagtgctgagcgtggaagccgtaggcacgcaggataacttcttcgagctgggcggcgattcgatcaaggctctgcaagtctcgtctcgcttgctgcaagcaggttatcgactggagatgaaagacctgttcagtcatccgacggtgtctgccttggcgctgaaagtccaatcggttacccgattggcggatcaaagcgaagtggtgggcactgtgaagctgacacctgttcagcattggttctttgagcaaaacctgacggatgctcatcatcataaccaatccattatgctgcatagcaaggacggttttaatgtagcggcgctgcgtacagcgatggatcaaatggttagtcatcatgatgcactgcggatcgttttccgccttaccgagcacgggtatgaagcttggaaccgcgcggtgggtgagggcgagctgtatacgctggaacgtatagacttcagccatgagactgaagtgtctgcagcgatcgaggccaaagtaaatgaaattcaggcgggcattcatttaagcgaaggaccgctggtgaagctggggctattccattgccccgatggagatcatttgctgatggctattcatcacttagtagtggataccgtatcctggcgcattttgttcgaggatcttacgacagcctatgaacaggcattgcacgggcaagcggctcgtcttccgcacaaaacggattcgttccgtaactgggctgaggcacagtctcactatgcgaacggtccagcaatggaagcagagttctcattctggaaagaagtggaacagggaaggtatgagccgcttccaaaagaccagccacagtcatcttccttgaataaagacagcgagcttatgacggtcacatggaccactcaggaaacggagcagttgttaaaacaagcgcatcgtgcctacaacacagatatgaatgatctgctgctgaccgcactcggcctggctattcatcgctgggcggggattgaacgcgtactcgtcaacttggaaggccatggacgggaatccattttgccagagctggatattacgcgcacggtgggctggtttacgagtcaattcccggttgtcctggatatgagcgcagggcaagatctttcacaacgtatcaaacaggtgaaagaagggctgcaccggattccgcaaaagggtattggctacgggatgctgagatacctatctgcagcatgtgagcaagcgcattttggaaccgaacctgaaatcagctttaactatctcggacaatttgaccaggatatgcaacatcaatccattggcgtgtctccttacgctagtggtgccgagcttagcgcacatgcagccagatcgcacacgctggatctgaacggactgatttccgaaggtcaattgcaattgacgatcagctacagccatcaggaatatcgcaaggaaacgatggaacagctagccgaagcgctcagaaccagcctgcaggaaatcatcgcgcattgcgcgggtcgcaaacagcaggaactgacgccaagtgatgtgatgcttaaacctgtaaccttggccgagctagatcagttggtcgaacggacgcgtgacatcggggaactggaaaatgtatatgcattgacaccgatgcaaaaagggatgttgttccatagtctaatggatgcagaatcaggggcttattttgaacaaacgacctttgatctacacggacgcttccagcccgatattttccaagatagcttgaatcaactggcgcagcggcatgagatctttagagccaatttcatcagcgggtggcaggatgagcccgtacaggtgattttccgccataaagaggttggtttcagatgtgaagatttgcgtcatttggatgatcaggaacgtgacgcgtatgtgcaggaatttattcgccaggacaaggcagctggattcgatttgtcccgggatgcgttgatgcgcgtggcgattttgcggacaggtgatgaggattattattttgtatggagttctcatcacatcctaatggacggctggtgtgtggcgttggtaacggatgaggtgtttgaggtttactttgcagccgtagagcatagagcaccgaagctcccccctgtgactccatacagtcagtatattgcgtggctggaagcacaggatgtagaagcagcagcctcgtactggaaggaatatttgctgggctatgatcaacaaacttcgattccgaccggaaaagtaggcgcgaaagcggacggcgaacaatttgagcatgtactgtgcgacctaggtaaggatttaacaggacgtatggaaatggtagccaagcagtatcacgtgaccaccaatacgctcctacaaacggcctggggcttactgcttcaaaagtacaacggtagtaacgacgctgtctttggcggtgtagtatcgggtcgcccggcagatatttcagggatcgaaaacatggtgggcttgttcattaacaccattccagtacgtatccgtagtaaggctgaggacacctttgccgacctgattagagcgaatcagcagcaggcgctggcttctcaagattatgaaacgtatccgctgtatgaaattcaagccttgaccgagcaaaagcaagagctgatccagcacattatcgtgtttgaaaactatccggtggaggagcaggtcgagcagcttggcgaaggtgcggaatcggattttgtcatcagcaatgcagggatgattgaacaaacgaactatgatttcaatctggtcgtcatgccgcaggaagcgatgaaaatccgattcgaatacaatgcgaagttatatgatcgggaagcggtggaacggacgcagggtcatctggtacagctgctggagcaggtggtagcgcagccggacattcaagtgcaggagctggatgtgttaagcgagcaggaacgcgagcaaattctccgtgtatggggagatacagctgctgagtatccaagcgatcaaacgatccatggcttgttcgaagcacaagcagtgcagacaccggaacagccagcgctgtacttcgaaggagagcagttgacctatcgcgagctgaatgaacgtgcgaatcgtctggctcgtaccttacgcagtcaaggcgtgacgaaggatcggctggtgggtctgatgaccgagcgttcggtagacttgattgtgggtatgttaggcattttgaaagctgggggcgcatatgttccaatcgatccaacgtatccagaggagcgtatccgctatatgctggatgactcgggagcagagctgttgttgacgcaaagccacttggtggacaaagtagctttcgacggtcaggtgctggtgctgaatggggcagagagtgtgcatcacgaggatggctccaatctggagccgttgtccggtccgaacgatctaacgtatgtgatttatacgtcgggtacgacggggcagccgaagggtgtcatggtagagcatcgc

1. A Paenibacillus species strain comprising only one genetic locus comprising at least 80% sequence identity to a polynucleotide sequence of any one of SEQ IN NOs: 222, 223, 224, 225, 413, 414, 415, 416, 417, 418 and not comprising an open reading frame for a diaminobutyrate-2-oxoglutarate-transaminase comprising an amino acid sequence of at least 80% sequence identity to SEQ ID NO: 217.

2. A Paenibacillus species strain as claimed in claim 1, not comprising a polynucleotide sequence encoding an amino acid sequence comprising at least 80% sequence identity to SEQ ID NO: 1.

3. A Paenibacillus species strain as claimed in claim 1, being an Paenibacillus polymyxa strain and having an ANI-Value of at least 99.9% to the Paenibacillus polymyxa strain LU17007 deposited as DSM 26970 or to the Paenibacillus polymyxa strain SB3-1.

4. A Paenibacillus species strain as claimed in claim 1 being derived from a parent strain, wherein the parent strain comprises an open reading frame for a diaminobutyrate-2-oxoglutarate_transaminase comprising an amino acid sequence of at least 80% sequence identity to SEQ ID NO: 217 and at least two loci each one comprising at least 80% sequence identity to at least one of the nucleotide sequences of SEQ ID NO: 222, 223, 224, 225, 413, 414, 415, 416, 417 and 418.

5. A Paenibacillus species strain as claimed in claim 1 being derived from a parent strain, wherein the parent strain comprises an open reading frame encoding an amino acid sequence of at least 80% sequence identity to SEQ ID NO: 217 and an open reading frame encoding an amino acid sequence of at least 80% sequence identity to SEQ ID NO: 409, and an open reading frame encoding an amino acid sequence of at least 80% sequence identity to SEQ ID NO: 410.

6. A Paenibacillus species strain not comprising a polynucleotide sequence encoding an amino acid sequence of at least 80% sequence identity to SEQ ID NO: 1 and not comprising an open reading frame for a diaminobutyrate-2-oxoglutarate-transaminase comprising an amino acid sequence of at least 80% identity to SEQ ID NO: 217, derived from a parent strain, wherein the parent strain comprises an open reading frame for a diaminobutyrate-2-oxoglutarate-transaminase comprising an amino acid sequence of at least 80% sequence identity to SEQ ID NO: 217 and at least two loci each one comprising at least 80% sequence identity to at least one of the nucleotide sequences of SEQ ID NO: 222, 223, 224, 225, 413, 414, 415, 416, 417 and 418.

7. A Paenibacillus species strain as claimed in claim 1, being any one of the Paenibacillus polymyxa strains of LU20754 deposited as DSM 33970, LU21132 deposited as DSM 33971, LU21514 deposited as DSM 33972, LU21552 deposited as DSM 33973, LU22377 deposited as DSM 33974, LU22378 deposited as DSM 33975, LU22379 deposited as DSM 33976, and LU22381 deposited as DSM 33977.

8. A mixture comprising a) a pure culture of a Paenibacillus species strain which does not comprise an open reading frame for a diaminobutyrate-2-oxoglutarate-transaminase comprising an amino acid sequence of at least 90% sequence identity to at least one of SEQ ID NO: 217, 218, 219, 220 or 221 and b) a pure culture of a microorganism which is sensitive to at least one of polymyxin, tridecaptin, polypeptin, paenilipoheptin, octapeptin, jolipeptin, gavaserin or saltavalin.

9. A mixture as claimed in claim 8, wherein the Paenibacillus species strain of a) comprises no or only one locus encoding an amino acid sequence comprising at least 90% sequence identity to SEQ ID NO: 1 and does not produce a polymyxin or a tridecaptin.

10. A mixture as claimed in claim 8, wherein the parent strain of the Paenibacillus species strain of a) comprises at least one locus encoding an amino acid sequence comprising at least 90% sequence identity to SEQ ID NO: 1 and does produce at least one tridecaptin.

11. A mixture as claimed in claim 8 comprising a pure culture of a of a microorganism of b) selected from Azotobacter, Azospirillum, Pseudomonas, Paraburkholderia, Rhizobium, Bradyrhizobium, Bacillus or Streptomyces.

12. A mixture as claimed in claim 8 comprising a pure culture of a microorganism of b) selected from: Pseudomonas koreensis, Pseudomonas gessardii, Pseudomonas chlororaphis, Paraburkholderia phytofirmans, Rhizobium phaseoli, Rhizobium radiobacter, Bradyrhizobium japonicum, Bacillus licheniformis, Bacillus subtilis, Bacillus amyloliquefaciens, Bacillus licheniformis, Bacillus mycoides, Bacillus firmus, Bacillus thuringiensis, Bacillus pumilus, Bacillus simplex, Streptomyces griseoviridis and Streptomyces lydicus.

13. An agrochemical composition comprising a Paenibacillus species strain as claimed in claim 1.

14. A method for controlling, suppressing or preventing fungal infection of plants comprising the steps of a) providing a pure culture of a Paenibacillus species strain as claimed in claim 1 and b) applying an effective amount of the a pure culture of a Paenibacillus species strain to the plant, pathogenic fungi, their habitat, plant propagation material or the soil used to grow the plant.

15. A method to enhance plant growth comprising the steps of a) providing a pure culture of a Paenibacillus species strain as claimed in claim 1 and b) applying an effective amount of the pure culture of a Paenibacillus species strain to the plant, pathogenic fungi, their habitat, plant propagation material or the soil used to grow the plant.
